United States Patent Application Publication US 2025/0051766 A1 - sequence listing, part 11

SEQ ID NO: 5065 - DNA, 58617616 bp, Homo sapiens (residues 19,539,208-21,710,230 of 58,617,616)
  source 1..58617616: mol_type = genomic DNA
cagcccttggggctagagctgggttctggcctctcagagcctcaattttccctcctgttaaaatggggatcatgggccaagcacggtggctcacgcctgtaatcccagcactttgggaggccgaggcgggcggactacctgaggtcaggagtttgagaccaacctggccaacatggtgaaaccccgtctctactaaaaatataaaaattagctaggcctggtggagcgtgcctgtaatcccagctactcaggaggctgaggtgtgagaatcacttgaacccaggaggcagaggctgcagtgagccgagatcgtgccactgcactccagcctgggtgacagagggagattccgtctcaaaaaaaaaaaaaaaaaggggggggatgatcgtggctgcaccttgcctaaaaggaggctcccagcggtccccatcagtagcagcgtgcttccttctccccactcctcacccacagacgccacccccaccgaggagccaatggcgactgcactgggcctggaaagacggtccgtgtacaccggccagccctcaccagccctggaggactgggaaggtgagttagcctgcctcggagtcccgtctctgctgcgggcttgttgggggtggggcttgggctactggggtcgtgtgaggagagggcacacactagacgaagggcccggcgccgtcctggtccccggacatgacagcccctggaggtgatgccccaagttcaagatctaagtgagaggccggtcagacagaggcaagagctcagcgcaccgggatggaccaggtcaggccctgggcggcagaactggggtcgcggggaacccagtctgccctgcacctgtttcaggccgctggctcgggtcgtgggcgcgctcggctagccggtgcccaccgggggagggggctgagacagcaagtaaggcctttgcacgcatgcatgggggcctacaggccgccgccctggtcccagcgcgtgcggtgcccgcagaggccagcgagtggacgtcctggttcaacgtggaccaccccggaggcgacggcgacttcgagagcctggctgccatccgcttctactacgggccagcgcgcgtgtgcccgcgaccgctggcgctggaagcgcgcaccacggactgggccctgccgtccgccgtcggcgagcgcgtgcacttgaaccccacgcgcggcttctggtgcctcaaccgcgagcaaccgcgtggccgccgctgctccaactaccacgtgcgcttccgctgcccactaggtgagggcggggctggatgacgggggcggggctttgaatgggcggggctggcgaacgccgggaagagtcgtggtgggtggggctgggaggggcaggaccgtgtgggtgtgggcgtggctgggaagagccgggggacccttaggcgtaggacgacgtcagggggcggggccaggcagggcggggcttttgaagagaggcgctgggaacagcgcggggcccaagtgcaccgtcaggaggcccagcgggtcaggacccatgtccggccccctggaacgcatctccctcccgctgccctcatttgagcatctgtaagagctcagttctgtggagtgtcttgagcccaaatgcgtgcaggatgcagggagaaaagcaggactgatccccgggaccttatgcgggggtggggaggtgggtcggtacctaaactatgtcttcgacaggcgcgcctaggggagcatgggtgggggcgatggcagatctgctctctggagtgtccgcccttggatgcacatatgtgagggggttggggaagaagggtcctttagtcccaggttacccggaggcgcagttcctggggagggcggccacctgatctccgtccctgccttccgcagaagcctcgtggggcgcgtggggcccgtggggtccctgctcggggagctgtgggccaggccgtcgcttgcgccgccgccactgcccaagccccgctggggatgcgtgtcccgggcgtcctctggaggcgcagaagtgcgtgcggcctcggtgtccaggtaggaggggcggggtctggaggctgggacctgtacagaggggaggaaggggaggttaggggctgagcctgggagagagggtggagttagaggcggtgcctggatgtagagaggcagtgcttctcctgagcgatgcctagaggggaggagctagttgggggcggggcctcgtggacggggctgtgaagggcggggcctggtgcgggggcggagcctggaggacccaaactctggagccaggtggagaccagcccttccttccctcctgggcccaaggagcactggtaactatgcacatctggacaggtggatgccagggggctcttgtgcaggcagacatgggcagataggagggggtgcttcccctgtgtgcattccagactgtacagatgtcttcgtggggaaacagaattcagttcatgcactcagggtgcacacgtgcatggcatttgcagcccccaccccggtcccccacgcccacacagacacccgctcacagcctggcagacatgatgcctaggccctcccagggccagacaccgggcaagccaggaggagactggaaattccgctagcgcctgggctccacaaacacggcctggaggctgctccggggagcccgtcacagggtgggggcacatggtggccaatggggcgttggggtccccaccccatcgcgcctggctctgctctcccggtgcctgtgccctgaagtttccagtggaattttccattttatggagaaaccgcaggattgggaaggggggcagttgttctcagcccaagatccagccccttactgggcccccagcccctgtccagacattttctcttctgctggaaagggcagtgccatattttgagacttacctctcctgtcccctcctataggacctcttccctacgtctctggatcccagttcctatgccctggcccagtcctgaccacttagcccatctccccttcacactagggactgctccaagcagggccatgctgaggcctctgagaggcaccttatgggggggccccaggcatatttgttgagtgactgattgaatggaaagccctcctcaggagggagtgtgaaggtttctctgtcctgcttcctctccatatccccccagggtgcagccttgacacctgtgaatgcccggaccacatcctcctgggctcggtggtcaccccatctgggcaaccactgctaggagccagggtctccctgcgagaccagcctggcactgtggccaccagcgatgctcacggaaccttccgggtgcctggtgtctgtgctgacagccgcgccaacatcagggcccagatggatggcttctctgcaggggaggcccaggcccaggccaacggatccatctctgtggtcaccatcatccttgataagttgggtaagcacccttgcaacatggggcatgaaggggctgaggatctggggaggaagttctagcactcgatcaagagaggaagaaatgagatgtgacacagtcattggcgaaggcacagagtgagtcggcatttctgggagaaaggagaggatggggacgttgctcctaggaagggtgggtgggagaagctctgatctttaccacctttgaccccagagaagccgtacctggtgaaacaccctgagtcccgagtgcgagaggctggccagaatgtgactttctgctgcaaagcctccgggacccccatgcccaagaaatactcctggtgagcgcccgccccgggctcaggggcatcttctgtggctttggggttagattcaatttcatgttgttatgtggtttcccatctggagagtggggaaagcgttaacggggaatgaattgggtgggagagggactaccaaggaggctgaatggggccagtcttgctggggaggaggctgactttggcaaagcctctctgcagctccccagcctgcagactgggggcaacacagcccctcccactgagtcctatggtgtcgctcacctgccatccaggttccacaatgggaccctgctggacaggcgagctcatgggtacggggcccacctggagctgcggggactgcgcccagaccaggctggcatctaccactgcaaggcatggaatgaggcgggtgccgtgcgctcgggcactgcccggctcactgtacttggtgagtgtccttggccacagccccgagcaagccttcacccaaacggaacccggactgtagctaagctcaaccccaaatggagcccccacttcagactgatccaatcctaggcctccactgagcccccataccactctgagcaccaaccttcagtccttaccctgggcagacccctgtcccttaggtggagtccttgactgcagacagagtccccagccttggcctccatgaagtcctcctccctgccctgacctgcatgttttctttgtccccagccccaggccagccagcctgcgacccccggccccgagagtacctgatcaagctccctgaggactgtggtcagccaggtagtggccctgcctacctggatgtgggcctctgtcccgacacccgctgccccagcctggcaggctccagcccccgctgcggggacgccagctcccgctgctgctctgtgcgccgtctggagagaagggagattcactgccctggctacgtcctcccagtgaaggtggtggcagagtgtggctgccagaagtgtctgccccctcgggggctggtccggggccgtgttgtggctgctgactccggggagccgctacgcttcgccaggattctgctgggccaggagcccatcggcttcaccgcctaccagggcgactttaccattgaggtgccgccctccacccagcggctggtggtgacttttgtggaccccagcggtgagttcatggacgctgtccgggtcttgccttttgatcctcgaggtgccggcgtgtaccacgaggtcaaggccatgcggaagaaagccccggtcattttacataccagccagagcaacacgatccccctgggcgagctggaagatgaggcgcccctgggcgagctggtcctgccttctggcgctttccgcagagccgacggcaaaccctactcggggcctgtggaggcccgggtgacgttcgtggacccccgagacctcacctcggcggcgtctgcccccagtgacctgcgcttcgtggacagcgacggcgagctggctccactgcgcacctacggcatgttctccgtggacctccgtgcgcccggctccgcggagcagctgcaggtggggccggtggccgtgcgggtggccgccagccagatccacatgccaggccacgtggaggccctcaagctgtggtcgctgaaccccgagaccggcttgtgggaggaggagagcggcttccggcgcgaggggtcctcgggcccccgggtgcgccgggaggagcgcgtcttcctggtgggcaacgtggagatccgggagcggcgcctgttcaatctggacgtgcctgagcgccgccgctgcttcgtgaaggtgcgcgcctacgccaacgacaagttcacccccagcgagcaggtggagggcgtggtggtcacgctggtcaatctggagcccgcccccggcttctccgccaacccccgtgcctggggccgctttgacagcgcggtcaccggccccaatggcgcctgcctccccgccttctgcgacgccgacaggccagacgcctacaccgccctggtcaccgccaccctgggcggcgaggagctggagccggccccttccttgccccgcccactcccggccaccgtgggcgtcacccagccctacctggacaggctggggtaccgtcggacggaccacgacgatcccgccttcaagcgtaacggcttccgcatcaacctcgccaagcccaggccaggtgaccccgccgaggccaatgggcctgtgtacccgtggcgcagcctgcgggaatgccagggggccccggtgactgccagccacttccgcttcgccagggtggaggcggacaagtacgagtacaacgtggtccccttccgagagggcacacctgcctcctggactggcgatctcctggcctggtggcccaacccgcaggagttccgggcctgcttcctcaaggtgaagatccagggtccccaggagtatatggtccgctcccacaacgcagggggcagccacccacgcacccgcggccagctctacggacttcgggatgcccggagtgtgcgagaccccgagcgtccgggcacctcggcagcctgcgtggagttcaagtgcagcgggatgctgttcgaccagcggcaggtggacaggacgctggtgaccattatgccccagggcagctgccggcgcgtggccgtcaacggactccttcgggattacctgacccggcaccccccaccggtgcccgcggaggacccagctgccttctccatgctggcccccctagaccctctgggccacaactatggcgtctacactgtcactgaccagagcccacgcttggccaaggagatcgccattggccgctgctttgatggttcctctgacggcttctccagagagatgaaggctgatgccggcacagccgtcaccttccagtgccgggagccaccggccggacgacccagcctcttccagaggctgctggagtccccggcgacagcacttggtgacatccgcagggagatgagcgaggcggcgcaggcacaggcccgggcctcaggtcccctccgcacccgccggggtagggtccggcagtgacctgggcaggggcctcgctttcccacctccctccagactcctttgaccccaggaagttttgcccctccttcttctccagacagccccctccccaggtgtctgggtcccctttcccgcccctttccagaactcagagtcagacaagaacccagagcatccgatggtagaaacaccaggaagacaattgttgctgtgtggtatggaatggagtttgcggtgactctggggccagcacccaggggacgacgttcaaccctagcctgaagggacccgctcccagctcagaagccgtctctgacttctcgtgcgtattttgaccctgatttcaatcttctacccttgggagttctggcgtttggcacaaagtcccctctgcctgtttggagctcagtgctagaccaggtcccctgccccgagctttgtttttggggttatttattgaaacaaagtgtggggagctggttgtgggtgtgagtgggggtgtggggtccaggctgggcccagtgaaaaggaggaaggggttcccatgcgggggaggctctggggctgaggggaacaattctcacgtgtttggtgcttagagacctgcccggggcgttgggcaggccctccgggggctgaattaaaaatgctttatttccaactcatggtgtcaggctctagggaggaaggatggaggctggggctgcccggcccagatacacctttcaggcagaaacacgcggaggcacacgcgggtgccgggggcaagaagcacgggcggctgtgaccgctgaacacagtggcagcctgctgctctggcctggactccttggctgtgcctggccgtatgccccggggctacagcaggcagggaggggccctggcaggggagcctctggggcaggcaacagcaagccaggccaccctggacctcctcagtcgagtccacagcagccccaccctgggccccacccacctgaaccccggccacacctcggtcatgtggcgacggggctgcccgaggccagggctttctgaccttgccaggaccctgggtctggaggcggcagaatcacggctggctggcagtctgtgtgcacgtgtgtcctcctggcgctccacagggccggcgctgtcctgaccacacccccactgtccagacagaaaaactgaagtcctggggtctggcatgaatcccagcaggtttgagccccctatagctctaggtgtgtgattccccagggtctggggatgaaggcatcaatgtggcaagactggagtggcctccagggcacctgggatgggagacttgtccctggctgacaccccctagggagtgggggtatggagcgtcccttagcttagggggcaaccacccacttcctcttcaatctcccacccattcactggctcccctctccagacccccgatctcatcattcacccatccagcatttagaggtgtgagctctgcactagcaacttcaggggacctgagagagcctatctctctagggggagacaggctcacacgtgcataccccaatatgccctgggccagtgctccacccagagggtccctggctcttgtccactggccacatccccccttcggctgaggtcttggcaaatccgaacctccgcagctctcaccctttcagtcagggaaacacttcctttgccctagggtggacttgggggcctggaggcatgggagaagcccaagatgcgaggcgtcacccctggtctctgaaggtgggccctaagggctctgctggagtttgggtttgggcagccccagacattggcaccccagcctcaccctcgataggctgtgacaggcaagagaggcgagaggtccctgagggagctggcagggcttgggagaacacacatttatccagaacttactgtctctatacccccagctgataggctcagaggcacaggcccctcccaaggcaacctaggttcccggcctgcctgccacagaaccctgctcagggctgcctggtgggggtcctggggaggggtgggaatgggggcgctcccacttgaagcgggcaaagctggctgcagctttccaggcggagggtgatgaggtgtcaggctccacggccaaatacctttcattgagaaagtgttggggcctccgacgctgccaggctagggcggccagccaggcatggagcgggcagctggcccagccctgtccccttccctagggtggggcaggggtggacgggcatcctccagaagccccctccccagtcaccacgcctgggccaggaagggcatctcaggaggaggacatggctgaagcaaaagctgggcagggcacggggctagagtccagctcctccccatccctgctgataactctgcaagagggcagcgtttggccacaatttccagatgaggaaactgaggctccaagagaaggacgccatcaacctgagtcaacagccttgtgcctcttgacactgcctgtctcccccaactgcagccctcaagccaggaatcccaccccctccctcctggaacctgggctaccgtccgcctcctggtaaatccattgtctaccccccaaccaaattggggctgccagaccacaccccctcagtctgggaggagtgaggggcaggggaccccctcgaagagacccccagctgcagccaccctgggtcagctcagggcacaaacaggcccttggtcccgcccacggcattttagacttttataattttagaaccaggggttcttaaaattcctagcaccatgatggggaaaaaatcttggaacagtaaaatgtttaaaacaagagtcttcaaaccacagaatccaagaggagggagataaaaatgaacacacattgagcgttgactgactgtaagccctccgagccagcccccgcaaagcctaactcactttaagggcatttagtataaatctgttgccttgggatccccaaaatatgcttttagggaggatgatttttacccccattccacagctggaggaatcttctcagggtcacacagcaaatggggtactgtgggctggggaagggcaatgtttcctggagaaggggacataagcactgggtcttgaaggatgtgtaggagtttgctgggtggccaaggcaggaagggcataccagggagctggaaaggtgaacgtgaaagctggaggagggagacccacggagggcggcagtagaagggagacacaaagtggaggtgagcaggggctcgaatgctgagtgaggagcctgagttctctggtgagcaatagggagctatgggttgtgctgaagcaggagaaggttacacaatatctcgtgacaaagactcccctggagctggtgcaggactcagcttcttacaacatgcttctttcacggaactggggtctgctccctcctacttgggggcccttccagggtccaaaccctgcagcccagcgccctctccccgccagctgcctcctgtcctggctgaacatccctggctcctccattggggcctcgtggacctggcgtggccacccaccacttccctagccccgtctgtctctctcatcagccctcagagttgggtctgacccagcctcagaccccaaagactggagccagcctggcggggagacctggctttggtcaggtgggggaagtgcttgtgctttaatggtggaaacaaaggcaggatgccacagggtgagagcagaccaggagaatgccatgtcccgatgcctcagccctcccagggcaggagctaagtctagacccctgggccgagggtggagggggtctgggcaggcaggagggaggagaccccggccatcggggaatcagcagaccctgaggtttggaggtggatgcagggaaacaaacactaccctaggcagggcgagtgtgtcacacagagccagacacgcctgtcatcgatctcgaggtcacgctgccctcgtcacgccccatccctgtcccctgtagtcaggggcatgactccctccttcccatacttcctagccaacttctcgtcacctgattggtgacactgtcaccctcaggacagccacataggcagttgcactcgaaaagagcatgagcccagacacaccagacccatgggacacgctggacactgtcccccctcatcacagcagcacgggtagacagatgcaccctcaacacagagaaaggcccacgcttagggtcaggtagcggtgcctgcagctgcgtgcacctgtgcatacctgtgcacacctgtgcgcacctgtgcccagctcccctttgactcacccatcatcaccccacacatcgggacacacttgacccccagactcccagctggccagtctcaaccccccacgaccctccacaactcagccccaccaggcacatgaagccatgccgagcacaggcagcacctcccactctctcggggccctggggagcgggtcggccctggggctggggactggcgggaggcctcaaggtcccagccacttttccagggaagtcctgaatcccttcctgctgactcagccctgggggctggctaggctgggggctgccaaacctcaggtatgtccttgaaggctgcctggcggggcctctgaggtgggggcgggggctcccactcgggactcagtccttccctgggccccagcctccctccttgccccagatggagctgcagctttaaccgtggcgttcagggcatggggccagcacgatggagcctgaggccggctgctcccaccccagttcctcccggctgagggttggtggaagaataagctcccagcccagccagagtatcccagcctgactgtggcctcataaagacagcactgtctggtgggaggtggcctggctgcccatcctggggcccagcacagggacccatgcacacacagtgggcacacacgtacccatgtgatggctacatgcagacctgtggatacagatgtgcatcatcagacacaaactcagcaccaggactggcccccacagaaccccagtcaggagggggaggcagcactggccacagatactccagtctgcagggccaaggttggccagcccaaaggccaggggctgggaaaacccagaggagggcccagggaaggctttctggaagagagggcattttgacttgggctttgaagggtgagtaggagtttaccaaaccaagctcagatgtccaaaagtcttaatgctggttttgaggtttaccttttgtctgtgaggatgttgggcaggggagggagacagacaaaccccaattcactacctccttttgaggacccagcctctgccctcagggagcttccagtcagataggggaggcagcactgactcagccaggagggatagaagatacttcagctgtgtgaagcacctgtcgtgtgttgggttggatcctgtcaaaaacccatagggaaaattctattatgatccccattttacagctgagaaaactgaggctgagagcgggacataccttgctcagggcccacagggaagcagagctgttcacacacagccctggttgctgacgtgcaattgtggctgctgacctggtcccaaaccaactcaaaagtttgcgggccagaatggtgcagctcaaagaagtctgcgttggcaaaagttgcatctttgcacctggaatcctggccaggccgggaggcccctcctcccgggacatacaagatccccctgggacttctcagcgagatcatcccctgtcctttgttatctggctgctgagtggctttcacggggcaggggcttctaggcagagggatgttggagtgagggcctgggggtgcttcgccaggacttctgggaggcctgggtccccagcctcggccccgcttgccatctggcccagctgaacacaaacacttggacatggccgacccaacggaatctgggttgtggtcaggccgtggctgaaaaagccactggaaaaacacgcagcccacggggccaggcccagcttacgtttcaccagggaggagtggcctgctcggcgcccagagccgaggaatgtccgttctctaaccctttggaacttgttgtctgactggggaatccagcagctgggcggtgccatccttagtgccctctggtcaggctgtgacttacctcctgctgtgttcttggagactcaggcctcttggcgtggccccctggcccagcccctggccagccactgctgaagaccccttgtcagcttgcacacccctgaagacagagggctcactcccttccagctgtcatgccaggcagccggaagcctgttaactaggctgattttttttttttgagacagattcttgctttgtcgcccaggctggagtgcagtggcacgatctcggctcactgcaagctccgaactaggctgattttttatgggaaattcgggcttccttggccacacagatgggaggtcagtgcagcctgggcactccctcctttccctggggttccacctccttctggatctccggatgtcccctcaggcccctaggatcagcaggtcccagtggaccccagtatctcactgcgaaacgtgttcctcaccctgcagccatgtctcagggttatccatctgtctgtctgccctgcgccgcgggcagggctggtggcccacacatccactgagtgcccactggatgcggaagcacctcacttgcatctcctcactgacctctcccggggaggctggtcccattagtgctccactttgcgggggagggccgggggggcggtgtggggaaacagaagctcagggggtttcttttacgtcctgaagatgtggtggcagattctggaagtaggagccagttccccactggctccaggacaagggcctgggaaacctcgtttgtcaggccgggacaacgcctggtggccaaagggggagctgcagcctgggccatgggggtgcctgctgcagtgtccctagcttaaggctggcttgggttacttctctgctcaaacaccctccatggctcccgtagtctcctcagcgggcacaggggtgctagatgagcccctcctgggtcattacagagactcctgactgcaaaatcttgcctcttgggtcagacctaagccctgtcctcactcaacctcacagcctgtttccccagctggggaataaaccaacaatggcctttgcctcttcaggaactggtgactgcaaggctggcatgggttaggcgctctgtaattgcaattgtcaccctcagtaacgcacaggagaggggcagggacttgagctggggtgtcccaggcagcctcaaccaccctccctcagcaatcgctacccgcccccccgcccaggacaaggcatctgaatcagggcctcaatttcctccccagagtgtgggggcctccaaactttatcgagggtcctagtgtgttaggtcttgaaatgccccctggagtcgtaggggaacagaaatgttcactagggagtgggtatagggccttgccaagcactgatgaaggggccctagaaacttccatctttttttttttgagacagagtctggctctgtcacccaggctggagtgcagtggtgcaatctcggctcactgcaacctccacctcccgggttcaagttattctcctgcctcagcctctcgagtagctgggattacaggtgggcaccaccatgcccagctattttttgtattttagtagggcttcaccatgatgccaggctggtcacgaactcccgacctcaattgatctgcccgccttggcctcccaaactgctaggattacagatgtgagccaccacaccctgccaaaactttcatcttaaaactatgagggagaccttgaaactctatgtgggggaaattgaaactgcatatgggggtcttgaaggtgccactgcacaccttgcttggcctgagcaaacctgcaggttacttccacccgtgacccacgtggggagactgacgccagagacctcctccccacacaccacgcctctcctcatccctcaacactctccgggacccgcttccgtccaaaaaacccccatgggccaggcaggcgtaaggttgcggcccagggaggggcagcccgttccctagggccacacggcccagccccttaccccgttacttggggcaggggtcgattccgagccaagggttggggcgactgacctagagtgactggagctaggcccgcggctgcctgagttgccccatctctatcccaggagagggaaccagtgccaggaggaagaccaggcgcccgcccctgcggacgctcctagccccttagctaaggtctcaggacaccggctggcggtgaggacggggcagctcaggggaaaagaaagccagggagggccgggggctccgaggggttttagggaggggtacagcagttagccaggcggagggaatgccagtgcaaaggccctccctgcggtgggaatgagcttactcaggggcagtgaggggtcagcgaagagggagatgcccggatcctcttctattgtaagatcgccccctggcggcccagtagagaaggggcagggagatggggccggtccaacctcccgtctaccctccagctctcccagcctggcagatgagtggcccccttctcccagcctgggtgtccccaaaggcaagaaggaaaaacagaatcccagaccttgcgagagcacccctgcatggacacagccgtcagcacctttctgtgctcatgggattgccaccaagcccttcgagcaggagcacatgtgcccattttatagaggggcaaatgggctcagggagagaggggagcaagcagggtgcagaggcaggactcaaacccaagactccggccctgtctggggctctggcaggttgggctggaccaggttgagggtgtctgttgggagctggaggagccactatgggcctgtgagggtcccaggtaggtggtcaaggtgggaggctggggaatccagaacgcgggcgcaggggacagtacacatcaccagggttccctctctgtgccttggtttccctagcacttcgttgaggaaggtgagaacatcactggctccctcctcaaatggtcccccactcgttttgggatctgctggggattcttgcttcaatccatgtgcccacgggccactgggagtccctacaacgctgccagtggccccatttaacatgcaggtcccaggtcaggcatggtggctcacacctgtaatcctagcgctttgagaggccaaggcgggcttatcacctgaggtcaggagttcaagaccagcctggccaacatggcaaaaccccatctctacaaaaatacaaaagttagccaggcatgagggcgggcgccttaatcccagctacttgggaggctgaggtaggagaatcgcttgaacccgggaggcagaggttgcagtgagctgagatcgcgccactgcactctagcctgggtgacaaagcaagactccgtctcaaaaaattaaataaaatgcaggtccccagttccctcagcggaggctcctacagatttggatgtgtctagagattgaaagcattatccctcactttccaaattcttgctgtttcaaaatgaggaaggctgagagctgaaagcccaccatcccgtcccagctggacccacaatatgggtgatgtgtggtccaagggcgggcagaggcggttaccccagtcaggatcacacactccaggtatttagctaccatttgcaaaacactcttgctagaggtagtggtgtgtgtctatagttccagatactcaggaggctgagacaggaggatcacttgagccctggagttcgaggctgcagtgagctatgtcactgtactccagcctgggtgacagagcaagaccctatgtctaaataaataagtaggccagcatggtggctcagtcctgtaatcctaccactttgggaggccgaggcaggcggatcacttgaggtcaggagttcaagaccagcctggccaacatgacaaaactccatctctactaaaaatacaataattagctgggcctggtggtgggtgcctgtagtcccagctactcgggaagctgaggcaagagaactggttgaacctgggaggtggaggttgcagtgagctgagattcacgccactgcactccagcccgggtgacagagcgagactctgtcccccctcccctcaaaaaaaaattatttatttaataataaaaataaataggctgggtgcggtggctcatgcctgtaattccagcactttgggaggctgaggcgggaaggtcacctgaggtcaggagttcgagaccagcctggccaacatggtgaaaccctgtctgtactaaaaatacaaaaattagccaggcatggtggtacatgcctgtaatcccagctactcgggaggttgaagcaggagaatcacttgaacctgggaggcagaggttgcagtgagctgagatcgcaccactgtacttcagcctcggcaacagaacaagattctgtctcaaaataaattaattaaaataaaataaaataaaataaaatataaaataaaataaaaagaaacacaaaaattagccaggagtggtggcacatggttatagtcccagctactcaggaggctgaggtggaaggatcgcttgagccgaggaggtcaaggctgcagtgagccatgattgcaccaatgcactccagcccaggtgacagagtgagaccctgtctcaaaaaaaaaaaaaaaaaaaaaaaaaaaaaaaaaaaaaaaagctgggtgtggtggctcatgcctgtaatcccagcactttgggaggctgaggcaggtggatcacttaaggtcaggagttcaagaccagcctggccaacatggtaaaaccttgtctctacaaaaatacaaaaatcagccggacatggtggcaggtgtctgtaatcccagctactcgagaggctggagcgggagaattgcttgaacctgggaggcagaggttgcagtgagccaagatcacgccattgcactccagcctgggcaccagagtaagactctgtccccattcccctcaaaaaaaaaaaaaaaaaaaaaatcaggaggggaattgatgagactaaagggtacatgcattcttattttttatagagatgggttatcactctgtctcccaggctggagttcagtgacatgatcacggctcactgcagccttgaactcctgggctcaagtgatcctcccgcctcagcctcctgagtagctatggtgtccatcacatctggctaattttaaaaaatgtttatgagacagcggtgtcactatgttgtccaggctggtcttgaactcctggcatcaagcgattttcccaccttggcctcccaaagtgctgggattacaggcctgaaccaccatgcccagcctcaacgtgtccacttttaatatgaatagattctagaaaattgccctcctgggcggctgtaccagactgtacccaccaccactgccttcaggctgggagccccccgccctgctgcttcctcctatctaggggctcggggtgcaggtcacaaagcctctgagcctcattgtccccacctgttatgtggagacgcctatcagcacccacacagctagcaggcagttcaagtccctggtgactcctgtgtccctgtaatcacctttatggcttggttactatcatgcagccaacttttaggcacatttgaatagtgcaatataaaatattaataaagtgtgactttgtgtgcagaatttgacctgggttgggggggtggggcgggtgcagcagctcacacctgtaatctcagcaatttaggaagccgaggcgggcggatcacttgagcccaggaggttgagaccagcctggccaacatggcaaagtcctgtctctaataaaaatacaaaaattagctgggcatggtggcgcatgcctgtagtcccagctacttgggaggttgaggcaggagaatggcttgaacccaggaggcagaggttgcagtgagccaggatcatgcccctgcactccagcctgggcaacagagggagactctgtgacacacacacacacacacacacacacacgcgcacaacgaatttgaccggggtggggatttcttttatcgaaaccccccaagaggcctagctctgaatctctgaaccgtgatctgcattcacgctacaggcagaggagggcgggcgggagctggaggcgtagctgcccacaggctcagctccagcctctggcaggcacatccagtcaccgctttgtcctcagcacccagaggagctgcccggcaggtcctgccctctccctccctcaaggacctgcccagcagctctcccgggctcacagccttagtttccctcccacaccgcatgtcccccagtgacctctttgctctgaatccccccaagggctgacgaggctagagcctccgattttctagtagttgtggccccatcactccactgaagctgtcacacccgatgctggacttggaggtggcttcttgatcctggtggagcttcacttctgctcctggtgtctgtccttctttctgcttctatgacatcctctcctagtttctgtcccatattttggcctccgttgacttccaaattgctctctgcagagcaggcctctcccatgagtgcgactcccatgtgcagctgggggacggacaccctgggcctgacagcgtggagctgaaccggtctccccctcaaaaccatccccgtctattccaccggagacttcgggcaccgtgactcctcttcatcagcaagtactgtggcgccaccttcgcctccatcacgaactcagcgacacttgaccatccaccacctaggtcccaggaccctcctatgcccctcactgctgtctgtcctggatgcagcattggagtggctgtgaagatgctgagtctaatgggcacccccgagggctggcacctcctgcccctcctctgtgtgtgtggacacctcgaggtagggtcagtgctctccgtacgctcatgctcacctcctgtaggccttgtctcagaaggcaccttccccagttgggatgggactgagccacaaagcagaaggcgcactggcccgtgctccaacgtggatgaacctcaaagacacgatgctgagtgaaggaagccagacatgaaggccacacagtgcacaagcccactgatctgaaatttccagaccaggcacatctgagacaggaagcagactggtggccgccagaggctggggaaagggaatgaggagtgactgctcatggggacaaggctttttttgggagatgagaaagttttggaaatagaagtgatgatgttgtgaatatattcacttcattgagttgtgcactcaaaaatggcatacttggcagggcacaaggctgaagtggggagatcacttgagatcaagagttcaagaccagcctggccaacatggcaaaacctcatctctactaaaaatacaaaaattagccaggcgtggtgcatgcctataatcccaactattcaggaagctgaggcacaagaattgcttgaacccaggaagtggaggctgcactgagccgagatcgtgccactgcactccagcctgggcgacagagcgagacggagtgcagtggcacgatctcaactcactgcaagctctgccttctgggttcacgcgattctcctgcctcagcctccccagtagctgggactacaggcgcccaccaccatgcccgtctaattttttctatttttcagtagagacggggtttcaccgtgttagccaggatggtctcgatctcctgacctcgtgatctgcctcagccgtccaaagtgctgggattacacttcgtgtgtgagccactgcgcccggccaaaaaaatgttttttaaaggggaaggggaagctttatgttatgtatattttaccacaatttaaaagagaaaagataaaaaaggccttctcttggaaactggccctgaacccaccccccaacttttgcgtgtgtttctgataacttctgtctggaatgtagctcacaagagcagggacatgccctctgtctgtgagtcttgggctgcagggggccatgaggcaggcagactggatgtgacaacaggaacttagggtggggatgggagttgccttcatttcctggctgcaaatggtagaaagcgcagccacaccaccgtagggagggaatcccatgccagggctgactaggttatgagcagggggtgggcagaggtaccacgactccaggcttctagtccctggatgctcttcccacctagtcatgccttgggccccgcaacacccgaggctgcacagagcccagggccctggttcttggtgccgtccagcacccaaacatgaattgggggatgccaagctctaagccgtgcacagcagtgggccaacaggacctcacgcacagtatgcaggaaaagtgctttggaagtttatcgtctttaatgacatttcaactgaaaacagaaaccagctgggcgcagtggctcacacctataatcccagcactttgggaggccagggcaggtggttcacctgaggtcaggagttcgagactagcctggccaacatggtgaaaccccgtctctactaatacaaaaaaattaactgggcatggtggcgcacgcctgtaatctcagctactcaggaggctgaggcaggagaatcgcttgaacctgggaggtggaggttgcaatgagccgagatggcgctattgcactccagcctgcgcgacaagagcaaaactctgtctcaaaaacaaaacaaaacaaaacaaaacaaaaaaacagcaaaagagcaaatagagcaaaacccgaaaaaagtgcaaaactaattcccagtaaaattgagctccgaacataaaataaatatatataattgagacagggtctcactctgtcacccaggctggagtgcagtggcgtgatctcagctcactgcagccttaacatcccgagctcaggtgattctccctcctcagcctgttgagtagctgggactacaggcatgcgccaccatgctcagctaattaaaaaaattttggggtggggggcggtcgggcacggtggctcaagcctataatcccagcactttgggaggctgaggcgggcagatcacttgagctcaggagttcaagaccagcctggctaacattgtgaaaccccatctctaccaaaaatacaaaaaattagctgggcatagcggcaggcacctgtaatcccagctacttgggaggctaaggcggaagaatcgcttgaacctgggaggcagaggttgtggtgagccgagatcacaccactgcactccagcatgggtgacagagcgagaatctgtcccccaaaaaaaaaaaaaatctgaaagcagaatttttttgtagagacgaggtctcactatgttgcccagacgggtctcaaactcctaggctcaagcaatcctcctacctcgacctctcaatgtgctgggattacaggcatgagccactgctcccagccaggacattttaaaatcagaacagaatgatacggtcccacagaagacagtgttgggagtctgtgcctgagcggcgcaggtgagtggcaaaatcacagcacacatgacactgcagctgtgaccggtgtcaactaccacccaaaacaaatctggcaaacagacatcggaattaaaataagtcaaaaattttaatgggaaaatctgtgcccagtcctagaacagacaattcaattcatagcgttaccataaaattactgtcaaaaaaacgaactgaagtgggagaatgagtggcgtttcaggccatctcgagtcgcagcagacacatgagccggcgccacgggcctggctgaggagcaggggctcatgggcaccaccacccatctgggttttctgaggtcgtcggcggcacgttcagtaacaaagcaacggctggcgatacatggcagctcacgcagcgctctttcctgcttatcccccaaacttaattagatgtactggagttgatgctgccagggtctccagcaggtgaggcagttgcaggttggggggtggccccctgccagctaccctgggcctgaaacgacagagactgagcatcagagtgggtggccgtgagactggtgactacccagcccacgtgctgcaggcggagcctccaggggtccctgggaaggcttggaaaagatccacagatgacctccagctcagtggaggagggaagggatggaggggtcggtcctgggtcacagctggccttgccacctgacatgggacatggacgagcttccccggcaggaaaactggcctctagtggcttccctggggcttaggcaaaggactgactggcatcgggtacaacaagggctcctgcccggcgaggggcagggaggcaaggtcaggcctggagcccatgatgacgcccggagcgtcatggtgagactcggtgggaaaaaggggctctgaaacctggcccaacactggcctggctgggcagcaaggagggtgggaggcaaccacttgtcataaggggtgggggctctgtctgcagtgcagagacggcatcacgtccaacggcgctaagacgtttgtccacaggacccacccccactatggtgggcacggtacaggttaaggaagtggctgggactgctctgcccgtgagtgtgggagcagctcagacgggtgcaccacctgggggcactctgctctgaactggggtggacacacagctgctggcgcgtagtcaggtcccaggggtgcaaagggcaaggtgaggcccctcacgtgtgtccctggctgggggctgcatggtgatggggggcagctgccacagcaggacagtgtgggacgtgtgcttcccaggaccaggtgggaccccacagacagcacaggaggcatccgttctctgaacccctgggagagagtggtgagttgggaggggcacccggctctgcagtgccctggcacacaccacacacacagcctcgtgcctgtgctgggcacatgacacctgggcctcctcagtgtcttcaagacggtccccactcgctgccttcccagccaagctgcggcactgaggtctgagcccgagggaaggccccatctctcctccggcctcctctgctggctgcctgcccctccctctcgagggaaggacaccatgtcctcccacagtcctctaggaggtgcccttcccctccacagccaaagccctcatcttggggttcatccccactgactgttcccagcggctgccgtggtgacaagtggaggtgggggagggcacagtcattacagagtggggccctgcagagctgtgccccagaggtggccgcgcagcatggcctgtgtggctgctgggacctctggggaagctgccccaaggccgaggggtggctgacaagacgaccctttctgagaacctaccacccacctgggcgctgtgggacagtgcctgagactcacctgggactgcaggcagcctcccccaggaggaggctggagagaggccagagtccgcagggtgaggaaggcgtccccagcgctgggcagcgggaagggtccagaggagcctggaagagatgggagccggggtgggcagagtcgtggcgcctcctcaggtggaacccacccagcccctcagccggcaggaggcctcgaatgtggctcctgcccctcctcagcatccggcctctgctcctcagcccccacccaggcaggccagcgggccctccccaccacactactcatgtcccctcatggcttgtcttttttttttctttttaagacagtctcgctctgtcacccaggcttgagtgcagtggcacgatcttggctcactgcaagctctgcctcccaggttcacaccattctcctgcctcagcctcccaagtagctgggactacaggcgcccaccaccacgcccagataatttgttttttctttctttttttttattattattatactttaagttttagggtacatgtgcacaatgtgcaggtttgttacgtatgtatacatgtgccatgctggtgtgctgcacccactaactcgtcatctagcattaggtatatctcccaatgctatccctcccccctccccccaccccacaacagtccccagagtgtgatattccccttcctgtgtccatgtgttctcattgttcaattcccacctatgagtgagaatatgcggtgtttggttttttgttcttgcgatagtttactgagaatgatgatttccagtttcatccatgtccctacaaaggacatgaactcatcattttttatggctgcatagtattccatggtgtatatgtgccacattttcttaatccagtctatcattgttggacatttgggttggttccaagtctttgctattgtgaattgtatttttagtggagatggggtttcactgtgttagccaggatggtctctatctcctgacctcgtgatccgcccgcctcggcctgggattacaggtgtgaggcactgcacccagcccatgccgggctaattttttttgtattttcagtagagacagggtttcaccatgttggccaggctggtctcaaactcctgacctcaggtgatccactcatcttggcctcccaaaatgctgggattacaggtgtgagccaccgcacccagacctttcatgtcttttcttattagtatcgccattctgtccccaaagcacaggtatctgttggttgggatcatggccaagaggaacagaactctcacagttgaaacagaagaaagagttacacagagttgaccactgggggaagggagatgtggtcccactgtggcctccccagatgcagctcagtggccgtccacatgggtacagatgactgtccctgggccagcctcactcaccggagctaggtgttgacaggcagctggcgtggttccctgggaccccaacttccgtggtatccacagccgttttacccgtgtaaatggtagcctcttcttgaaacttccccatgttctttttataccggattcttttgttgccaaaccagttagagacctgcggacacacaggagtcactggaggagctgacccagcgacttctgagacacgacgcagtctgtgggttccctggggtgcccgttgctcccactgccttagaagacaacactgcaccctggggctatgaagagtctgggactgagaaggtggcgccctctgaaccacggacccagggagatgtccacatgggttgaggacaccctggagctggcgtgtcttagaactctgctgcctaaaactggatgttgctggaacctgaacctgggaaggggctggaaggaaaacaagactgtctgaggtgggccgggagggacagcgcctctggctgccatgcagcaggcggcaggttacgttccgtgttctcttcaggaaaagtgagagccagggagacctggggacccagtaactgcgatcgaatcccaaacttatcaaatgaaaacaaggtgaactctgaaggggtagttggaatgtaccaggtgctaggataagcacttctcatatattcatatatttttcttaattttaattaaaaaaaggttttttggccgggcgtggtggctcacgcctgtaatctcagcactttgggaggctgaggtggggggatcatctgaggtcaggagttcgagaccagcctggacaacatggagaaaccccatctctactaataatacaaatattagctggacacagtggcacatgcctgtaatcccagctactcgggaggctgaggcaggagaatcacttgaacctgggaggcagaggttgcagtgagccaagatcgcactgcaatttagcctgggcaacagagtgagaccctgtctcagaaaaaaaaatatattttttctttttttttagagatagggtctcgctctgttgcccaggctggtctcaaacccctgggcttgagagttcctcccgccctggcctcccaaaatgctgggattccaggcccagcctcatatatcattctgcctcatcctcatgaggacctgggaggcagctgttatcgtccctgctgtaagaaagcagaggcaggagaaaaaggagctagtccatggccaaggtggaatcagcccagctctgactgcaaactggcactggagtcccccagggaggggcttgtcacctttggtggcactgctgatgcttgggctccatctgctctgtgggggctgtcctgtacactgcagggtgctgagcggtatccttggcacccactgggtgccaggagcacttcccttctctagtcgtgacaacaaaaatgtcccctgggcagattcacatgggtgagcaccccagggccagcgccttcctacaggcatggagacgtccatccagggccacatttcagtatcccaaagcaagtaaaataaacgtatagtataataacacacagaaatgaaacagctgagggatggaagaggattgtggatgacctttgctacttcaaacatttttttctcactctgtcacccaggctggagtgcagcggtgcgatctcagctcactgcaacctctgcctcccagattcaagtgattctcttgcctcagcctcaccagtagctgggactacaggcacgtgctaccaagcctggctaatttttgtactttttttttttttttttttcggagacggagtctcactctgtcacccaggctggagtgtggagtgcagtggtgcgacctcaactcactgcaacctccgcctccctggttcaaatgattctcctgcctcagcctccccagtagcgggattgcaggcatgtgccaccaagcctggctaatttttgtatttccagtagccacggggtttcaccatgttggccaggctggtctcgaactcctgacctcaggtgattcgtccgccttggcctccaaagtgctgggatttcaggcatgagccaccatgcctggccaacatttggtgtacttacattatccttgcaatgttaagtataaaaagaaggatccctgtctgtgtgctctctgttccaaacatagtgtctgcctaccccgggggtgtgagcagccttctcttgatccacatgggaggccccagaggctccatcctggttgaagcagccctggttgtcctccagacaattgttccttgggggccaaatgtctcacgcttctccaggggccttgaagacccagaggcgcagccccttgctccagctctggccttgtttctgacaccacagcagatcccgatgagcaaagtcatatgtgactatgacctcaggatgttttgctgcctgcgtgaccccgaggggttccaattgctctctgtcacagagacttgactggacttagcctgggttggagcagagcatggtggtgaaggactagaaactcagcccctccaactgcaaagtagggagggctgtggtgacatgcagcaagccatgctgtgggtcagcacctgccattcctgctgccatagaggctgtggggctgtgcctgcccaggtgggagggcggcacccaggccctgttccacacactcatgctgccacgggggtatggcctggacctggcttgctgccataggctgcctggacttactgtttccatgttaaaaccttcggaaatatttcttagcctcttggtcttagtgtctccctctttcacccccagttccacagaggacactggtggctgcctaccaggctatagagtcagggagctcacactctctaccacgtcacctcagggggctcacactccacagcatcccccagggaactcacactccatctcaatcacctcagggagctcacactccatctgtatccctcagggagctcacaccccacctgtatccctcaggcagctcacactccatctgtatctctcagggagctcacactccatctctgtccctcagggagctcacactccacctcaatcacctcagggaactcacactccatctttatccctcagggagctcacattccatcagtatccctcagggagctcacactctatctgtaaccctcagggagctcacactccatctgtatccctcagggagctcacactccatctgtaaccctcagggagctcacactccatctgtatccctcagggagctcacactctaccagtatccctcagggagctcacactccatctgtatccctcagggagctcacactccatctgtaaccctcagggagctcacactccatctgtatccctcagggagctcacactctatcagtatccctcagggagctcacactccatctgtatccctcagggagctcacactctatcagtatccctcagggagctcacactccatctgtatccctcagggagctcacactccatctgtatccctcagggagctcacactccacctcagtcacctcagggaactcacactccatctgtatccctcaaggagctcacactccatctgtatccctcagggaactcacactccatctgtatccctcaaggagctcacactccatctgtatccctcagggaactcacactccatctgtatccctcaaggagctcacactccatctgtatccctcaggaagctcacactccgtctgtatccctcagggagctcatactctgtctgtaaccctcagggagctcacactctgtctgtatccctcagggagctcacactccatctgtatccctcagggagctcatactctgtctgtatccctcagggagttcacactctgtctgtaaccctcagggagctcacactccgtctgtgtccctcagggagctcacactccacagcatcacctctgggacctcgcattccatctgcatcgctcaggaagtcctcaggtctctctgtgggtacacttgcacccctgcctcacagatgaacggggagagcgctggagtcccacatttgtaatgcagagcctggatctgagctggcctggctgactcagagcctggagacttggctcctgttccacactttttttgtttttcagagataggatctcactctgtcacccaggctggaatgcagtggcgccatcatagctcactgcagcctcaccctcctgggctcaagtgatccttccacctcagcatccgaaggagctgagaccacaggtgcacaccaccaagcccagctaattttttaaattttttgtagagacagtgtctcactatgttgcccaggctggtctcgaactcctggcctcaagcgaccctcctacctcatcctcccaaagtgctgggattccagcagccatgcctggcctctgcacacatttaacaaacttccctgggtgtcctcatgggacctagtcatccactcctcccaggcgtggcgagacgtggcaggagagaacgtcacctgggagatggtgaggccgcccttcctggccagctcttctttggcttcttcgctggggtaagggttgttcagatgggagtaaaaatactcattcagcacttccgtcgcctgcttgctgaaattccgccgcttgcgcctgcaaaaacagccgccttcgtaggcattaatatgctgggactccagtaccacccccacctctagttctgagtatgattttccagtagttctgaaaacagcaatcacttgaggtcaggagttcgagaccagcgtggtcaacatagtgaaaccccgtttctactaaaaacacaaaaattagctgggcatggtggcgggagcctgtaatcccagctactcgggaggctgaagcagtagaatcgcttgaacctgggaggcggaggttgtggtgagtggagatcgcaccactgcactccagcctgggcaccagagtgagactccgtctcaaataaataaataaataaatacaaaataaaataaaaatgaaaacagcaatacttcaggccttcttcccaagaggctgtgaggcctccaaccgtgactgcagacacagcctccagggctgtcttcaacccaagccagcactatttccctccagtccctcagagccggcccttgaggttttgggtacgtacaggccctgacctggcatcgagcagccgcgaacgcagggtcatcactgcctcacaggtgctctgcttcaactgcatctggatggcgctgaacttgccgtgaatggcgccgaccatgcgctcaatctccttaggggagacaggcctcatcctgctctgctcctggaggaggttggtgacgtgcgtggtgaactcacgacaggcctggggtgggagcacagacacgccggcctgtgactaggcagcagggtggcacagggcagcaggttccacagcggagcagccgcctgccaccccctgtagttcacacaccggcgggtgactgttaagtaaatggaaagggctttcagtaacaatggaccacctctgcagcgaccaactgcatggactccctgttctgcgccacgaaagaaaggtggttagcgttccgtgtttcgctttgacaaatgcgcattcacatgacagaaactcttccatgcagaaagatcacctgttcatatttctctagctcagagtggtaaatctgtcggatctgggacagcttggccctgtagtcagagtgctcaatgctattgtcatttggacagccacctggtgttgctgtgccggccctggccaccgctcctcctcttcctctcttctcgggcctgcacacgccctcagccagcagcatgttatccagcctcaggagctgggcgtcagggggatcttcgtcttgaatgccacggatgcttaccactagataagagagaccgggacaagtcacaattcattttctggagagaaaacaaaccatgagaaaatgtgagcactggtgttatgtctgaagatttttgcatagaacccttcgggagaaaggaatactccactttatcaccaaattggatgatggacactgagcaccccgctaagacatgggtccaagtgccatccttagagcgcagtctggggaggaacggggagacacaggtcgcagtttggcatagcctgtgagggcaaaccttggtcacagctgtgtgcacgcagcagggccaggcaggcgcctgttgctggggtcacctgaacccctgaaccgagtctcaagaagtgctggggaagagggggcacccaagatgctgcatactgataaaggcaagtggcaggctggcattggcagcgtggctggcctgggcccaggactgtgcagctgtaggcctgttgtggctggtgggtggggtgtgtgtgtgttggggtgggggtgctgttataaaactggataggaaaagcctgataaagaaagtgccagaaaagatgaaataacccactgaaagattttaagcagagaaacaagataatgggccctacaatttggaaatgccgtcccagctctgcagagaggggacctggataggggcagggctggactgcaggggaagcagtcaaagggcagccaccatcaaggtatacacagctgtggggtctgcaggtcagctacagggcagtcagagaacccccaggattcgtgtcctgggacacgggtgtcagagaagggaagactccagggtcattcccagattctgccatgggcagcacagccaatggcatcgcattctcccaagtaaaaagcctggagctgcagcttgtgcaggtggggctgagtgaaaaggtggcttcacggccgggcacagtggctcacgcctgtaatcctagcactttagaaggctgaggcgggcggatcacttgaggtcaggagttcgagatcagcctggccaacatggtgaaaccccgtctctactaaaaatacaaaaattagccaagcgtggtggcgcctgcctgtaatcccagctactagggaggctgaggcaggagaatcacttgaacctgggaggcagaggatgcagtgagctgagatcttgccactgcactccagctggggggatagagagaccccgtctcaaaaaaaaaaaaaaaaaaaagtgttctcttagaatcaggcttttttttttttttttttttttgagatggaatctcattctgtcacctaggctggggtgcaatggcatggtctccactcactgcaacctctgtctcccaggttccagtgattctcctgcctcagcctcccgagtagctgggactacacatgcgtgccgccatgcctggctaatttttgtatttttagtagagacaaggtttcactatgttggccaggctggtctcgaactcctgacctcatgatccgcctgccttggcctcttaaagtgctgggattacaggcatgacccaccgtaccgggccagaatcaggctatcttaataaggtcagctacttaccgaattagtgctcagatgacaattccgtttgattatatcatatagtcatttacaagtgtccctttcttattccctacataacagatgaaccttttctgtcaaaaactcactagtcaaaactgaaggaactcaagcgatatccttgtaagaattttccttagagatttccacttcaggctgggcgcagtggctcacgcctgtaatcccagcactttgggaggccaaggtgggcggatcacctgaggtcgggagttcgagaccagcccagccaacgtggagaaacgccatctctactaattagccgggcatggtgtcgagtgtctgtaattccagctacttgggaggctgaggcaggagaattgcttgaacccgggagacggaggttgcagtgagccgagatcacgccattgcactccaggctgggtgacaagggcgagactccgtctcaaaaaaaaaaaaaaaaaaaaagagatttccacttcaacacttagtgctagtttattaagcacacatgcaacaaattttataaaccaggattttgaacaagagacaaaaaaaattagcaaccagatccaaggactgaccacaaacctggtgcttaatacaggatagtgttggccaggcgcagtggctcacgcctgtaatcccagcactttgggaggccaaggtgggtggatcacctgaggtcaggggttcgagaccagcctgactaacacagagaaaccccatctctactaaaaatacaaaattagccgggcatgatggcacatgcctgtaatcctagctacttgggaggctgaggcaggagaatcgcttgaatccgggaggtggaggttgcggtgagccgagatcacgccactgtactccagcctgggcaacaagagcgaaactccatctccaaaaaaaagaaaaaaaaaaaatatacacacacacacacacacacacacacacacacacacacacatataggatagtgtcccaccttctccaaaactgtttcttactcaattaaaattggaaaaagcaatatgagaaaagtgggaagatttcaagaagaatccacacaccctgttaaactttcaaggtagaatagatggcggcacaaagttgcagacatgcagagacttaaccacaagtctccagtacccaggcagcgaatgtccatggcacaaattagtcatgcaaattagacataaatttgtctaatttgataataagaacataaactataatagaaacagccaaaatagctaatacatgagattggttaagtaaattatgatagaaccataaaataaagccgccagcaactctattttcctttttttgtttttttttctgagatggagtcttgctctgtgtcccaggctggagtgcaatagcacaatcttggctcactgcaacctctgcctcctgggttcaagcaattcttctgcctcagtctcctgagtagctgggattacaggcgctcgccaccatgcctggctaatttttgtatttttagtagaaacagggtttcaccatgttggccaggctaatctcgaattcctgacctcaagtgatccacccaccttggcctcccaatgtgctgggattacaggcgtgagtcaccacacccagcctcacacccagataatttttgtatttttaggagatacggggtttcaccatgttgcccaggctagtctcgaactcctgagctcaagcgatccacccgcctcggcctcccaaagtgctgggattataagcgtgagccaccgcacctggcctgtttctaaaatttctaccaccaagtctatgaaaaatcatcaccaggaatgagggcatcaggatacatccccttgggaggctgaactatatcagagtgggtattcctcaaactgcttttgtgcatatcactcaagcttggccctgtctcttcatagacgccctcctctgcctccacatacttatttaagcagacactacaggctatacttggtgccagctccctgcagcccgtggccactgtggcccttggcctcagagcttcagaaaacaccccctctccctgagtgccaggctgaactgaaggttcccaccacctcacactcaaggaccctcctcaccggctcactcagtctctttgggctgcaccgaggctctttctgagatggctgaaggaaaagtgtcccttttattagctggcagacagccttccagtttggtggcccaattttcctttttttttccttttttttttttaaagacagagtctctctctgtcgcccaggctcaagtgcagtggtgggatctcagctcactgcagcctccaccttctgggttcaagcgattctcctacctcagcctcccgagtagctgggattacaagcatgcgccaccacgcctggctaatttttgttttttgtttgtttcaagagaattcaatcgtttattgattacaacgtttgtatttttagtagagacggggtttcaccatgttgaacaggctggtctcgaactcctaacttcaggtgatcctcccacctcggcctcccaaagtgctgggattacaggcgtgagccaccacgcccagcctggagactcaattttctaacaatcttactttatcttcaagaagctccaccatcctggctaacacggtgaaaccccgtctctaataaaaatacaaaaaaaataattagccaggcgtggtggcgggtgcctgtagtcccagctactcaggaggctgaggcaggagaatggcgtgcacccgggaggtggagcttgcagtgagccgagattgcgccactgcactccagcctgggcaacagagcgagactctgtctcaaaaaaaaaaaaaaaaagctccagctgtctgttttagttcctcccactgccagcacccatgagcgaggacagcccacttggaatgatgctcatggggtgctgtgcctacaatctgggccttacagatctgggtgacagtcacagcaagtggacacccttggacagccaggtaaaggccgctcccagaattagcctgtgtttgcctattcctcgtaataaccctcccctctcctcctaatctctcctggctcaaaacagacaatggctgtcctctctgtagtccctctgttttcaaatcctattgattctgcctcaacaatcaactttccacttatccctccctaggtccctactgtgctaaccctctcctgccctttgtgacctgcggaggaaagtctctcccctcccatccctcatgcacacctgcaggccaacccttttcaaacacatcatgctgctcttttgttcaaaagaaacccagcctctaacatccttctggacctgcctttggaactgttccctcgcggagccttgcacagcctctgacaagcacagatgtcccacgtgcccctgaatcttgttcaacagctccttcctgagcacccatggaggtcgcggccaggtgtcatgtgtgggcggaggatacacaggactcagtccctccacacaggaccccagcatgctctgacagccggggtgaggaaagccacctccacaccttccattacaggcccatttgaaatagggaaaggagcatggtcaatgttggcacatgcagtgtaatgagagtgtgtgtgttcatgtgggtgtgaaatgcagggctgccgcagaatatgtggcattctttcattcattcatttatgtatttaggggctgggcgaggtggcttatatctataatcccagcactttgggaggctgaggtggtaggactgcttgacctctggagttcaagaccagcctgggcaacatggtgagatcctgtttctaaaaaaattttttttttcttgagacgaagtctcgctctgttgccaggctggagtgcagtggcacgatctcggctcactgcaacctccgactccttggttcaagcaattctcctgcctcagcctcccaagtagctgggattacaggcacacgccaccatgcccagctaatttttgtatatttagtagagacggggtttcaccatgttggccaggatgatctcaatctcctgacctcgtgatccacgcaccttgacctcccaaagtgctgggattacaggtgtgagccactgtgcctggccaaaaaaaaaaattttttttttaaatcatttacttatccaacaacaaacatctgagagcccatcacaagccaggtaccacactaagtgttgaggatttttattgtatttattatttttggggtctgtctctgttgcctagggtggaatatagtagcatcatcatagctttctgtaacctcgacctcctggggtcaagcgatcctcctgcctcagcttcctgagtagttggaactatacacatgccaccacacctggctaattttttatttttgtagagatggcatctcactatgttgcccaggctggtctcaaactcctgtcctcaagcgagcctccaccttggcctcccaaagtgcttgggattatagttgtgagccaccacacctggcccgaggattttaaaaaaatataccaaaacccacaggacttactgttctccaattaaaactctcaaattacagtgagaggctgaggcgggcgaatcacttaaggtcaaaagttcaagaccagcctggccaacatggtgaaacaccatctctactaaaaatacaaaattagctgagcatggtggtgcatgcctgtaatcccagctactcaggaggctgaggctgcagtgggccaagattgtgccactgcactccaacctgggaaacagagcgagactccatgtcaaaaaaaaaaaaaaaaaactctcaaattaaagtgagaacacctgtgcctttccatttactcttcatggggtatgcattgtacagcatttctggagaagagttttgagatactggttaaccttgaaaaagtgcataatctttaatctccaaattcccattctgtacctggaatttatcctacaggggtactgacacctacaaagatgtatttacaggaggcacagtgtttgtaatcgtgggcgaccagaagggtgcagatgtgcatgagtttgggcacagacagcatacctgtcaccctcgggccctgtggtgtcacctgtgtctcttgagggtgccattatgaggcaatcagatgtgataagccttatttctttaagattacacatttttggccgggcttggtggctcacgcctataatcccagcactttgggaggtgggtggatcttgaggtcaagaggtcgagaccatcctggctgacacggtgaaaccccatctctactaaaaatacaaaaattagccaagcgtggtggcgcgtgcctgtagtccccactacttgggaggctgaggcaggggaatcgcttggaactgtgaggcagaggttgcagtgagctgagatcgcgccagtgcactccagcctggcgacaaagggagactccatctaaaaaaataataattaaaaaaaaaagattatgcttttgaggctgggcaaggtggctcatgcctataattccagcactttgggaggccgaggcaggcagatcacttgaggccaggagtttgagactagcctggccaacatggtgaaaacccatctctactaaaaaaaaaaaaaaaaaaaaaaaaattagctaggtgtgatggcacaagcctgtaatctcagctacttgggaggctgaggcaggagatctgcctgaacccaggaggtagaggttgcagtgagccaagatcatgccactgcactccagcctgggaaacagcaagactccatctcaaaaaaaaaaaaaaaaatgcatttttgctatatatgtgttataagcaaaagcaaaacttaaaaagctaagttaccgaggagaaacgctgtgccttggtcaccaccatcagtccatgctggggacatctgccctgccagctgcctcttgggtggtgcctacaacagcttcctcagcaccgtgcctttgtgctccccgtacactgatgctggcctaattatggtcattagacatgcattaccatcaattacagcaagctcagttccggtgactgttccagagcttctcagctgtgctcctcagctcccccagggcccttgactggcaggcagggaggctggaggtaccagaagcttggttcagggataccatctgtcggaggcactgacatggggaaacagacttaaaacaaaggtacccccctcctcaaactgccaggcttccttctgttcccaacttactgtgtgtggcagaaactccagtaaatcaaacaatgacataaaataaaatcgggattatgtttttctaagaaacaatatggcaatgctgtgagccgaatgtttgtgtcacctccaaattcacatgtcgaagccctaactcccaacgtgactatttggaggtgacgcttttaggaggcagttaaggttaaatgaggtcataaggatgtggccctgatctgataggattaatgtcctgatgggcagagacctcagggagctcgctttccctaagaggtcatgtgagctcacagtaagatggcggccgcctacaagccaagagaaaaggcctcataatgaactacctggccagcaccttcgtctgggactttctaggccccagaactgtgagaaataaatttctattttgtaaaccacccagtctgggccgggcgtggtggctcatacctgtaatcccagcactttgggaggccaaggagggtggatcacaaggtcaatagatcgagaccatcctggccaatatggtgaaaccccatctctactaaaaatacaaaaattagccgggcatggtggcgtgtgcctgtaatctcagctactcaggaggctgaggcagaagaatcgcttaaacctgggaggcggaggttgcagtgagccgggattaagccactacagcctggcaacagagtgagactccgtctcaaaaaaaaaaaaaatcacccagtctgtggcattttgttagggtggcctgagtagactaagacagtaacataaccccaagttgctttaatttttctccccaggaacaaagacgtggggaaaagcagaaggctcagagggaaccctcctttgccctgacttccccaagctgctcacctgccccctcacccactcagcagtgctctcacttggcagcgggctgtgctcccgcctccttcccacagcaagtgggaaccatctctgggaccccagccccatagggagaaggctaacccatggattaaatcagatgccctgactgacccctcgggtctgccactttccagtcatgtggctgtcagtggtcactccgctggccgcaagccccagttgtgaacggagctgccccaggcaactgactggatggaattacatagaaccgcaggcccggcccagagcccatcagggtatgggactaagcaaaacactcacctcacgctctccctgctgtctcaaatcagcaagaagctggcccctcaaaagcagaggcagggcctcctgtgccaatcaatcgatcgtggaggctgagcctcctccccatctccccccaccatccacagccggaatgagcgttggagacggattaaactgtggaatctgggacagagggttgacgcctggtgagaggcggccaaatctctctttgaggagtcctttggtgacagagagccaaagcctagtgcgccgacctgagttgcaatgagtacctatagtcacagcttgctctgatcacacaggcgcaggcgcagacaagcatgtccgcctgccctcgggcccacccaccgtgtctggaactgacagtgccggtgactctgcacaggtgagaatcgacatgaaggagaaaacatggggacttcctgctttctagaaaccttttgaggctttttcagtcacttactgagcacctactgagtgctgggcctgagctttgaggatgacaagtggctgctgcttgccctggggggataagaaccagggtcttgctgctgctaccggggtctcctatgctactggcctcctgaccagtgacccttagaaagaacggggccactggccacagttctgccggtgggacccagcgtggtaactgggacctgggctgaggttaactttcctgttccagttttcagaaggagagctcaacttccatcagctccagcttatcttgtagtcaaagagccaaaggtaataaggaaatgagttctacaaggcattctggcaaggtgctcaccaggagccactttcatttgtagtgagagtgtttcctccctaaacaaggcctctgatattggaggacagggataggggaggcaggtggtaaataaccttctgtacttagacctcaactgcttaaaagaaaaaacaccagctactggggaggtcactcaggcaggagtgcagtggcacgctgcagccttgacttcctgggctcaagtgatcctcccgcctcagcctcctgagtagctgggactacaggcatgcgccaccctgcccagctaatttttatattttttgtagagacgaggttttgccatgttgcccaggctggtcttgaacccctggattcaagtgatcctcctgccttggcctcccaaagtgctaggattacaggcatgaaccactacgcccgaccagattttaccttgtttagagtaggactcctagaaaggtgatctgtcctctgggccagcccacacctgtcacctgcctacagcgaggccagcacagacaccagcatccgcacatggaaatgtattgcaatttgacagagtaatttgatgtctattgaatttaacacaacttttggccttactgacttgtatgtctgttttatttttcctttcttttccccagtagttcatcttgcttctgttttacatggccaccatgctggggtggccaaaaccgtgcctgaggctggaggggcctgaaggctgagcctgagctgctgctggaagctctgatgagcctctgaaccaccccagtcccagatccaaactctcagggcccgtaagagctggggtggaacagtccagaattgagagtaaacctatttcctcgcacgcatctgtaggatgcctgcttcccctctgcgtcattactgtcttgcgggtggcggtggcactgccacttggaaggagccggcattccacgttcctgtgtcagggaggtgatgacacagggcagagcgcctgctccagcacttccagtggagaaaacaccaggacaccaaacaaggaaggggagacaaaggccacgctgcaggaggagcgacctactcactttgggagacctgtttggtgggaagcaggcctgtccaaccccaagaatgccagcccaggggtgtcaggaaggctgcgggaacccaggtcatgcggtgctgccattggctttgggagctgagggactggataaggttattggccaaggaaggtgttcctgccacgatgcaaggtgacagtgtgagaataggtgggggcttccaagtggctgggtggtgctctgagcagcaggagacgagactggctgtgagaggcctatggaggaagtggtaccgcctgattccccaggagagtgccctgggatgtgaaggacatcgtggggtggccccagcaggaggctggggagcccaacacagtgaaggcagaaggccagcaggactcttccatgagaacccaaggccccctacctttgggatctggcctcatttgctcctggcacctcctcccaccccccaaatcctgctgctgcacactcctctcacctctcagctccaatctagcttcccagtgatacgggagtggggcaaggaagtgctgggtagagaagggcggggtccctggcgagggctccaccctcggccctgtgccctcggacctaagtgagaacaagcatttctgtttttgtggccaaaaggttgccttttggcctgccacgccccacatcttgtgcccaaataagcctgagaccttaagcagacacacacaagcagctggaagtcgagaggaacacaccagcagaagaacacaccaatagacactggcgggccattgatggtggaacaatgcagacaccaagggaaatccaggagagcccagtcactgagcggcccaactccagggcaaaaccaccttcccaatccaaccccctttgggccccccatccatctgctgagagctacctacaccactcagtaaaaccctgtactcattctccatgcccacatgtgatccgatttttccagtacactaaggcaagaaccccagaatatagaaagccctttgtccttgagatagggcagagggtctaactgagctgattaacacaagaagcctgcttctctttcagctaagctgaaagagcacactgtaacgcatgcccactggggctttgggagctataaacacaaccctaagacgctgcgctgctgctgtggggttggagaccacgttccccccacctgtctgactgcatgctcccccttaggggtttgagctgtggggcaccgaagaagtgagccacatccgtcacacaccctgcaagggggaaaagggaacactcctgtttcacccgggctccgggaacaccaagctcaggcctgcgtcatgaactctttcccagcaagagagcggaggtggccaggcgcggtggctcatgcctgtaatcccagcactttgggaggctgaggtaggtggatcacctgaggtcaggagttcaagaccaacctgaccaacatggcgaaaccccgtctttactgtgatcccagctacttgggaggctgagacatgagaatagcttgaacctgggaggtggagcttgcagtgggccgagatcgtgccattgcactccagcctgggcaacaaagcgagactccgtctcaaaaaaacaaaacaaaacaaaacaaaacaaaacaaaacaaagatgcagaaaggccaggttcagtggctcaccctgtaatcccagcactttgggaggctgaggtgggaagatcacttcagctcaggagtttgagagcagcctgggcaacatagcaagaccccatctctacaaaaaattttaaaaaatgagtcaggtttggtggcacacacctgtaatcccagctactcgagaagctgagacaggaagatcgcttgagccccggagtttgaggctgcagtgagctgactgcgccactgcactccagccagttcgacaaagtaagaccccctctcccaccaaaaaaagatacagaaaattaacaaaatcaattaaaacccttgggcaaacctggtcaggcacggtagctcatgccctaatcccagcactttaggaggctggggttggggggaatcacctgaggtcaggagttccagaccagcctggccaacatagtgaaaccccatctctactaaaaatagaaaaagctcacgcctgtaaacccagcactttgggaggttgaggcgggaagatcacctcagatcaggagttggagaccagcctgaccaacatggagaaatcccatctctactaaaaatacaaaattagctgggcatggtggcacatgcctgtaatcccagctactcgggaggctgaggcaggagaattgcttgaacccacgaggcggaggttgtggtgagccgagatcatgccattgcactacagcctgggcaacaagagcgaaacttcatctcaagaagaaagaaagaaaaattagctgggtgtagtggtgcacacctgtaatcccagctactcaggaggtggaggctcgagaaccgcttgcacccaggaggcggaggtagcagtgagccaagatcgtgccactgcactccagcctgggtgacagagcgagactctgattcaaaaaaataaaaaacccacaggcaaatcaaagaatagaaagaaccttccttaacctgataatgggcatgtcctcaagccccacagcaaaccccagtcttcctggagatattttaaagccactgattcaaatcagacacaggtagacagggaggtccctcctcggctcagaccagcagggtccagtcaaggagaccagaaactcgggagggggacagaccagcaggcagcaaggcatgacgaagaagatgtgacccactcacaggctgaagggtgtccctacagctggagtaacccagagagtcatggatgtaatggacaacttcccctcccctccacactgcccccaacagacctcaaggtgtggtctgacatgaccaagggctggttttttttttttttttttttgagatgaagtctcactctgttgcctaaactggagtgcagtggcacaatctcggctcacggcaacctccacctccagggttcaagcgattctcctgcctcagcctcctgagtagatgggactataggcatgcaccaccatgcctggctaatttttgtatttttagtagagatggggtttcactatgttggccaggctggtctcgagctcctgacctcgtgatcacccccttggcctcccaaagggctgggattacaggcgcgagccacctcctggcccaagggctgttttatcttatggtttcctgggcatcatgggcactgagtttactccttaactctaaacaaggagacttctggagcccagcctgtttgtattaagaactgcctggctttaccttttaggccacatcccacaggttagttcatttaagtaacattctaggacaggcgctagaacaggctttgttctgttctctgaggcagaccagcctggccaacatggtgaaaccccatctctattaaaaatataaaattagctgggcgtggtagtgcacacctgtaattccagctacttggggggctgaggcaggagaatctcttgaacccgggaggcagaggttgaggtgagtccagattgcgccactatactccagcctgggtgacagtgtgagactccatctcaaaaaaaaaaagtaacattctagataaatccttatcttaagtcatggaagtttctcagatccacaggactttaaaaagaataacccttaaaaaacactcatcagtttctgaaatagtggctgccacacactagatattcacccaactgagggattatcacactaggcaaatctccgtcatctctaattaaaatacatcacaaccagtcacaactgaagtgtgtcaggcctctgagcccaagctaagccatcatatcccttgtgacctgcacgtatacatccagatggcctgaagccactgaagatccacaaaagaagtgaaaatagccttaactgatgacattccaccattgtaatttgtttctgccccaccctaactgatcaatgtactttgtaatctcccccacccttaagaaggttctttgtaattctttccacccttgagaatgtactttgtgagatccaccccctgcccaaaaaacacattactcctaacttcaccgcctatcccaaaacctataagaactaatgataatcccaccaccctttgctgactctctttttggactcagcccacctgcacccaggtgaaataaacagccatgttgctcacagaaagcctgtttggtggtctcttcacacggacgcgtgagaaatgaagatgctggaaccacaatcaaatatgcaaattaatttcatttccatatgtttacatgtttgttaattaaaacactgcagttctgaaataaactagtatgtgatttttaaaaaaatgcctactgttctgtacatttaaaaaataaataggctgagcatgtggtggcttatgcctgtaatcctagcactttgaggggctgagacgggaggatcacttaagcccaggagtcccagaccagcctgggcaacacagcaagacccccatctataaaaagtacaaaaattagccggatatggtggcttctatctgtagtctcagctacttgagaggctgaggtgggaggatcacctgaacctgggaagtcaagaatgcattgagccatgatcatgccactgtactccagcctgtctctttgagacagagcaagaccctgtctcaaaaaataaacaaacaattatatgagctgctaatgctgagtaaaaatgatatgcggtttaggcttgtttttctgtgctactgtccttgcatgtggtaacagggcaaaaggaagacagcaaaacactgtaatatatagtgctgtaatatatatttttccagatgtgccaggcagcacatctggaaaaacaagcccctgtgaggagttgcaaacatttaagagccacagctaagaaaaacagcacttggccgggcatgatggctcctgcctgtaatcccagcactttgggaggccacgaagtcaggagatcaggattatcatggctaacacggtaaaaccccatctttactaaaaatacaaaaaattagccaggcgtggtggcatgcacctgtagtcccagctactcaggaggctgaggcaggagaatcgtttgaacccaggaggtgaaggttacagtgagccgagatcgcgccactgtactccagcatgggcgacagagtgagattccgtctcaaaaaaagaaaaagaaaaagaaaaagaaaaacagcactcactgatggcttctatctaccataaacaattttctttttctttttaatttttttgagacgcagtctcactctattgcccaggctggagtgcagtggcacaatcttggctcactgcaacctctgcctctcaggttcaagtgattctcctgcctcaccctcacaagtagctgggattacaggcacccgccaccccacccagctaatttttgtttttttgttttgtttttgttttttgactaccagaaaataaacacgaactttattaatagcaatagaaagggtttccaatttctcagaatgaaaataacatgacaccagtacaagtgttaaaacagtaggccgggagcagtggctcacgcctgtaataccagcactttggaaggccaaggcgggcatatcacctgaggtcgggagtttgagaccagcctggccaacgtggtgaaaccccatctctactaaaaatacaaaaattagccgggcgtggtggcggactcctgtaatcccagctacttgggcagctgaggcaggagaactgcttgaccccgggaggcagaggttgtggtgagccaagatcgagccattgcactccagcctgggtgacagagcaagactccgtctcaaattaaaaaaaaaaaaaaaaaaaaagagtaaatgcctacatttcttgttctgatagcttcccaccacacaccaaaggttcctcaaggacagctgccacagagctgctgcaagaacatgttttccactgagcgtagtttcacagtcaactactcaagcagaagactaaaatattatttctttttagaagatcttggttgagggagcacatatcaatatggagaacagatctttgcttctcgaattcaagaaaaaacattaattaatctatcagtttttctccgatacagtgtcccagagtgctctgtgaagaatccttttacatccctactacatgcctgggtgaagggagaggagggggtggcaagctgccagtacaccagcaggcactcctggtgatgctctgggctctgctccctttctgctggtaatagtaggcatcttttctgaaagctgcagcagcttgatgtggggcggtggggaggaaggggccacttaccaatcacctcttcttgaagccgtattttttgcgttcatagaagaggtcttagagctccccaaatagacaatcttcaggcagccatccctattcttctcctggatggtgcactccttacaataataggcatcagagaccccagggcctccacagatcacacagagccccggtaagatccatagttacattcatcacatatgcacaccagagtgcagggacgcacataggagtcacagataacacatttgccatcacatttttcacacagtcatctgatggcaacaccagcctgcttgcggcaaaagatcaaatcaggatgatgtttagccatagttcccaactaagctggccaccacacaatttttgtatttttagtagagacagggtttcaccatgttggccaggctggtctcgaactcctgacctcgtgatctacccgcctcaccctccgaaagtgctggcattacaggtgtgagccaccgtgtggcccaattttttcatctgaagaaatgctctaatttcaaacaacaacaaatgagagccatgggggaaaggtctagaagcttcaggagctgggctacagtcaccatgaggtgtggtgcctctttggctgagtctcacacagggaggtaaccagcctagcaacatgcacactaaccatgaccaaccaattcccagcctgcgaatcaaagagttttaggtcatccaatgccctgactactctaaaaagaatttcccaaggaactgatctatcaataagttcaccagggctggacaggttggctcatccctgtaatcccagcacttttagaggctgagaagggaggattgcttgaggacaagagtttaagaccagcctgggcaacacagcaagatcccatctccacaaaaaaatatccaggcatggtggtgcccacttgtagtcccagctactccagaggctgaggcaggaggatcacttgagcccgggaattcaagggagcagtgagctatgatcacaccagtgcctccaacccgcatgacagagcgagatcttgactcaaaaaaagaacgtaaaaagaggctgggtgcggtggctcacacctatagtcccagcacgttgagaggtcgaggccggcggatcacgaggtcaggagatcgagaccatcctggctaacacgatgaaaccccatctctactaaaaatacaaaaaattagaggagtgtggtggtgggcgcctgtagtcccaactactcaggaggcggaggcaggagaatggcatgaacccgaacccaggaggtggagcttgcagcgagccgagattgcaccactgcactccagcctgggcaactgagcgagactctgtctaaaataaataaataaataactaaagacaaagaaaaagaaagaaaaaaaagttctggtcaggcacggtggctcatgcctgtaaatcccagcactttgggaggccgaggcgggtggattacctgaggtcaggagttcgaaaccagcctggccaacgcggtgaaatcccatctctactaaaaatacaaaaattagttgggcatggtggcgggcacctgtaatcccagctacttgggaggctgaggcaggagacccgcttgaacccgggaagtggaggttgcagtgagccgagatcgcacgattgcactccagcctgggtgacagagcgagactccatctcaaaagaaaaaaagaagctccctagtatctacggtgtgccaatcccacaacagggcagagatgaaccacagatctgccttgtgctttcttgatgctggtcttccaggaaaggagtcagaggtcagaagacaaaccagaaaagtgcaagcacacaagacagtttccgtcagtggttaagccctaagaggcagcaaagaagtgctaattcataagaatgtgtatgtgcactaaggccttaagctacaggcacactgttttagatacggcccctaccaaagaccctcaatccttgaggtaagctttattgagatataattcacatgccatataattcatctgcttaaagtgaatacttcagtggtttttagtttatttccaaggttgtgcgaccaccaccactagctaacattctcatcctccctaaagataccccgtctctatgagcagtcactctttacgccccctccctagccccgggacaaccacgagtcttcctgtctctatggatttgcctgatctggactcttcatattgatggaatcacacagcatgtgatgtgacacttcacatctggcttctcctacccagcatcatgttttcaaggtgcacccatgttgcagcctgtgccaatacttcattcctctttatggctgaataatactccattgcatggatggaccacgttttgttttgttttctttcttttttttttttttttgagagagagtcttgctctgtcacctaggctggagtacagtggcgtgatctccgctcactgcaacctccgcctcccaggtgcaagtgattctcgcgcctcagcctcccgattagctgggattacaggcatatgccaccacgcccagctaatttttatatttttagtagagacggggtttcaccatgttggccaggctggtctcgaacccctgacctcaaatgatccccccaccttggcctcccaaagtgctggaattacaggtgtgagccatggcgcctggacacacattttgtttttctagttatcatggacatcaggttgttttcagattccttaatctgtatatttatatacaatgatccacttctctgtccaacagacactttggcaatgataggatgttctagacctttctattataggaggcaccagccctgtgtggctgctgagacttgaaatgtggctggtgtggctgaggaatgcactggttaattgcatttggttttaattaattcaaatgtaaacagccctgcgttgagtatctggagccacccagctgatgagactcaggggctcaatttgtgagttaccctgagactgaggggaggaaaggatactccaatcaacctggagaataagtcccccagctgccggggtctactcccacaagaaccctaaagaaatgtacatgggactcagccccagggtacagctaattagaaaaaggatctcagttccagagaggtgactcataggcctcagggtgactgctaggacccaggaaagccccatgagcaccatgacaccccagcttcctggctgaatttacagaacccgattctgtaattgcaacagatccgaccagctgacgaggaagggaaagaatgagaatggcttatgcctgccaactactagcaaggccaatcattagtcaggaagacaaaaaggcattccctgatgttatgcattatttacatttactcctctgaatggggctctgtgcgttcctacagcacagcaagggttcctgcagcacaacagccctggctgagaaacttcttgttccccagagacacagtcacagggtggagaaggcaaagcaggccccttctcaagaacggcccaggatgggatggccgagtgggtctgcaaggggcctctggggctcagcacaccgcctcggagctgcctacccactcgagatctgagatccgaagcttttcacacaagctgtcactcatgctcatgtggaggtaaagcctgacacattccaacgtgccaggctgtccctgctctggtgccaaacaccactgtgtgaattcaggccacgcctcagtcctcactgggaacatcaatgtgacaaaccttattttttatttttatatttttttagaggcagagtctcactttgtcgcccaagctggggtgcagtggtgtgatctcagctcactgcaaacctcacatcccaggttcaagtgattcttctgcctcagcctcccgtgtagctaggattataggcacccgccaccatgcccagctagtttttgtatttttagtagagatgggtgggtgagggaggtgggggggtggttcaccatattggccaggctggtctcgaactcctgacctcaggtgatccgtctgcctcagcctcccaaagtgctgggattataggcgtgagccactgtacctggccaacgtgacacatcttaaatccaacgctttcgaattctgcaacatacctagtcccagggtctcagcaaagggactgtggcccgtatctggttctcccagctaaattcaaagctctgcaactaatcagggtttattttgttctcagaacagctcctctagacaccgaggaggacagctgtttctgggaaggagggtttgggaggaaatgcatacgctgagggtgtccttggccttcagagaccaccgcagggcaggaacacccagacactgtggtgtggtgaagctgaccccaggagacaagctttgagggacctgcctgcatacctccgacaggccattcctggggttcaccagggactgctggcagtgcatccggtgatgccaggtttacatggaggaccacgttcttttcaggctgctgtgagtgataagccctgtgttctaagtcaggcccccagacactgaatcttctgaacctcataaggggaactggatgaaagggatttcagttagtatgtatcagtcaccagaaacagtttttcaatcaacaaaaacagaaaggcaccgggacagaccctgagaacatagcgcatcctagaccctgcgctggccaggaatggtcattgttcagatgacacaggtgggtgtgtggggcccatgagtgccggccatgagggacaggccctgggtccctttcatgagtgaggacagtgtacggggtggggcggcatgcagcctggctgtgggtgactggtgtgccctggggaggcccctgtctcttagagcttcccactgcccatctgtaaaacgggagaaaagggtctgcccgaggctgtgcagggctctggggaacaactcgaggaagccccgagctgcctgcccaggctccatcaatacccaccagacttaatctttgccgttgttgttgttgtagagacagggtcttactgtgttgcccaggttggtctcatactcttgggctcaagcgattccaaagtactgggattataagtgtgagccaccatgtcctgccccaccaggctttaaatgctctgtggaagtttggtctttaccataaggcctgctgcagacttcagccagagggaaatgtgagaactgtgggttaaatcgagaagcacgccaggaccccggctcatgggattgcccttcaagaggcggcccgtgggtaccacagggtgcaggatcaggaccatgaacagtttcctctgggctgagacttggccattcctagtcacgggatgaggacagatggagcagaatcgaaatcctgtttactttcctgccactggctggtttgtctccgagactagaaggctgaggtgttcctgacatcaaggcaggtggcccacaggtgggacccacagcactcactgactgcacttcctgatataaaaagatacctggacactccaggtgacactcaggaacaggcatccctcagctccaggcttgtgcatttcagggaggagcagttgctgtctcatccctgtcctactgtaccccaaaacataccctgtacccagatgtttgagccagtcagtgggaagaaagcattagcttccaaggaaatgcccaggtggccggtgctctgagccctgcagcggccttgggactcagcttggaggaatcaaaagtcctgagtggccaggcacagtggcgcctgcctgtaaccccacaccttgggaggctgaggcaggaggatcacttgagctcaggagttcaaggccaacctgggcaacatactaagacctcatccccccaaaaatagtcctcagcgacccctagacatggtggtgtgtgcggaagctgaggtgtgaggatcacttgagcccaggagtttgaagccaatctgggcaacacagtgagactctgtgtcttaattaaaaaaaaaaaaaaataaaaaataaaaaattaaaaatgtcgccgggcatggtggcacatggctgtaatcccagcactttgggaggccgaggcgggcggatcacctgaggtcaagagttcaagaccagcctgaccaacagggtgaaaccctgtctctactaaatacaaaaaattagccgggtgtggtggcagatgcctgtaatcccaactactcgggaggctgaggcaggaaaattgcttgaacctgggaggcagtgagccgagattgcgccattgcactccagcctaggcaacaagagtgaaactctgtctaaaaaaaaaaaaaaaagagtcctgagcatggccctcaaagcctaggcagatgggggtagggaggtggggcgacaccagcggttgaaatggacagacatctcagctgcactggcaacagttggtatcaactcttgttttccctcctgaaactgctgaatttgagactaacagactcatgcagtaacatccacacaggggcagatggaattatgaagaggcgtgcccaggctgaacacccacactctcaaaaattggtttctcgttcagccccagcagctcactggtaggaaggtcaagaatgacagcttcctgagactacagttgattaaagtactttttttttttagacagggtctcactctgtcacccaggctggagtgcagtggcgcaatgtcatctcactgcaacctctgcctcctgggttcaagtgatactcctgcctcagcctcctgagtaactgggattacaggcgcatgccaccacgcccagctaatttttgtatttttagtagagacggggtttcatcatgttggtcaggctggtctcgaactcctgatctcaggtggtccaactgcctcggcctcccaaagtgctgggattacaggcgtgagccaccgcacccagcctttaaaaagtactttttaaaatagttttttattattactaaattccagatgttgcattgctaaacatccgctgtgggcagtggggagcccccaaaggctgcttcctggggtcagggtcaggggtgagcaagggacaacttgggctgcctgtgcctattggtacacatgcctcagcaagtggtcctgacactggcttatttttattaggtgaaaagtgaaagggaccaacattacacaattccacaatactaagaaacacgtgaccacagccagtgtctccagggggtggatacacattggctgtgtccttctgagcggcttccctcagcctgcagtacttggggctcattcgggtacagggcccccgcttgtccagcttaccacacgaatgctgaagcaccatcagggagtgctgccagggagttgagggcaaatttgcttaaaaccagttcaccgctaacaagaaacttgtgtgtctggttccccaggaaagcctaacctttgtgtttccatttccatggcatctgctccccacaatttaaataaggaacagataagacaggtcatcagatatttacatacccatgagaggcatatgaggtgggcaggaagccaggggcatcacagcccagcatctggccccgtcgggaggatgacctggcactgggtgttggagaccaacagggggcatatcatgtgggggctgtcagcagcagcagtctgctggggggtggggacaaggaggggtctgcttggctgggggattaagtatacttgggggtgaaggaggtgggagattgattacacaagcaaaagtactgaggacaacaggagcaggctctcactgttggaggaaggagtcacaaacctgggaagagagaaaaatagtgggaaccctgtggtgaactagaattaaagatattggagtgggccaggtacagtggctcatgcatgtaatcccagcactttgggaggccaaggtgggagtattgcttgagcccaggaggttgaggctgcaatgagctgtgacttcaccactgcattccagcctggtgacagagtgagaccctgtctcaaaaataaaaataagctgggtgcggtggatcacatctctaatcccagcactttgggaggctgaggcgggcaggtcacttgaggtcaggagtttgagacgagtctggccaacatgatgaaaccctgtctctactaaaaatacaaaattagccaggcgtggtggtgcacaccataatcccagctactcagaggctgaggcaggagaaatgcttgaacctgggaggctgagattgcaccactgcactccaggctgggcaacagagtgagaataaataaataaataaataaataaacaaacaaaaataaagatatcataatgaactcatggtttttaatatataaaaacataggaaaacagatgtgaatgtgtgcgcacgtgtgtgtgtgtacacacgcatctgtaataacccacaaatattccttagctctgtgtcctaagagtgtccaagagcagcaacaccccaacagcaatgagcacatcaaaggccaagatttactctgaaaggaatcagggctccttagagaattgggtgaagcaggcagaggcagaacagaatatgagcctggttgggcacagtggctcacacacataatcccagcattttgggaggccaggagtttgagaccagcctgggcaacatgacaaaaccctctctctacaaaaaatacaaaaattagctgggcaacgtggctcgtgcctgtagtcccagctacttgggaggatggggtgtgaggatcacccacccaggaggctgaagtgagccaagattatgtcactgccctccagcctgggtgacagagtgagaccctgtctccaaaaaaaaaaaaaaaaggccaggtgtgatggctcacgcctgtaatcccagcactttgggaggcagacaggcaggcggatcacctgaggtcaggagttcaagaccagcctggccaacatggtgaaaccccatctttaataaaaaatacaaaaaattagctgggtgtggtggcaggcgcctgtaatcccggctactcagaggctgaggcaggagaattgcttgaacctggaaggcggagattgcagtgagccaagatcgtgccattgcactccagcctgggcaataagagtgaaactccatctccaaaaaataaaaataaaaataaatttacactggggagggttagggacatcatgtcctcatagcatttaggcgaaacttaaatgtagatttaaacttgaatttctcctttagtcaccagatctcttctgaaggctgggcaccatgcccacagccttacatatatgaattcacacagccctcaacagtcctcagtaaccatgagctaagtattattattgccccacaaatcagaggaggaccaggaacagagaaaggttcagccaaggaccagggtcatgcagccagaggtggaggcagaattcagaccctcttgctgttctcaactactatatatgtcaagtacacatcaatcttgcaccaaaacagtgttcagaaagaagcacacttttgtacaacatatacacacactttccacaagcctcagcaaatatgaagtgctatgctccaaagtgacacacaaaattcaaataattgacctcaagagaccaactcactctaagaaatcaagtgacacgttgtgcagatgacccttggtttaaatatcttcatcttatttggtggccccacttataagctactttcaaattgttattaaccttgaccaagtgatcaaggtcaatggtagcagtgacaggacatattgacagcatgttttccctgacacaatgtgctgaggacacacacattgcctctgtgggactctggccacagatgcacaacttcagtccaatctagaggaaacatcagacaaaccgcactgagggatgttctacaaaatgactgagcgcttcttaaaatggtcagcgtcattcatggatgacaaggtcacagatcacaggagaccaaagagacatgatgactaaatacaacgtgggattcagggcagaaaagggcattagggcaaaaactggggaactccaaatgaggtctgtagttcagttaaagatcattgtactcagcgtaatttcctggtttccatatttgtactatggctctgaaggtgttgacgagacaggaagcccggagaaggagatacgagaactctctgtactattttttcaacttttctttttcttttctttcctttttttttttttttttgagacggagtcttactcttcttgcccaggctggagtgcaatggcgcgatctcggctcactgcaacctccacctcctgggttcaagtgattctcctgcctcagcctcccaagtagctgggattacaggcatgtgccaccatgcctggctaattttgtatttttagtagagatgggggtttcaccatcttggccaggctggtcttgaacacctgacctcgtgatccacctgcctcggcctcccaaagtactgggactacaggtatgagccactgtgcccagccgacaaaactgttcttattcaatttccctaagtctgtcatttttcctttttctatatgactgaatgctaagcacctcttaggtcttcgacctagaatgcagctgcttgttactgatttgcaacagtatttctcagttataaactacaaaataaatcagtgtgcatactggaaaccagggcaatgataaggcagaaagaaaacatcctagccgtcttctgcgagacagaagggatgagcaaaacggcccaccatgcacataagggctgagacaagatcagaggtgtgctgccgcagctctagtcacacacaggaagtgcctttttttttttttttttttttgagacagaatttcactcttgttgcccaggctggagtgcaatggcgtgatcttggctcaccgcacactcttgttgcccaggctggagtgcaatggcgcgatcttggctcaccgcaacctccacctcccaggttcaagcgattctcctaccttagccccccgagtagctgggattaccggcatgcgtcaccacgcctggctaatttttgtatttttaatagagacagggtttctccatgttggtcaggctggtctggaatccagcctcaggtgatctgcccgcctccgcctcccaatgtgctgggattacaggcatgagccaccacgctcggccagaaagtgtcttctaaacagcctacctgtcttttccttgatctcacagagcacgctgaacagagcaggcttcatccgatggcaattcagagcatgctttctgaaagggaggtgacagaggagggtgtgagaaaagaatagtcatcatcttgtccccaagagtaaagatcttccatactgagaaatcaaaccaaacgagatctgccactctgactgtagataagtcgccttatgaaaatgcagtacaatcatatttcatgtgaatttgatttgcacaaaatcaatataaaggccagccgtggtggctcacgcctgtaatcccagcactttgggaggtcgaggcaggtggatcacttgaggtcaggagtttgagaccagcctggccagcatggtgaaaccctatctctattaaaaatacaaaacttggccaggcacagtggctcatgcctataatcccagaactttgggaggccaaggcaggcggattgcctgaggtcaggagttcgagaccagcctggccagcatggtgaaaccctgtctctactaaaaatacaaaaattagttgggcatggtggtgcccacctgtaatcccagttactcaggaggctgaggcaggagaattgcttagacccgggaggcagaggttgcagtgagccgagatcaggccactgcactccagcctaagtgacagagtgagactccatctcaaaaaaaaaaaaaaaaaaaattcgccaggaacagtgtcatgcacctgtaatcccagctactcaggtgggtgaggcaggagaaatgcttaaaccttggaggcagaggttgcagtgagccaagattgtgccactgtactccagcccaggcaatagagtgagactctgtctcaataataataataataataatgtaaagcaatatacaaatattcaaaacatttcccactatatgcaaaagtttaaacaatgcaaataactcatcaaaaactatggtaaggcattagtggctcatgtctgtaatctcaacgctttgggaggccaaggcaggaggaccacttgagcccagaaatttaagatcggcctgggcaacatggtgagacccattctcttcaaaaatttaaaaattagctgggcatggtggtatgcctgtagtcccaatccctcaggaggctgagacaggaggatggcttgagaccatgagttagaggctgtagtgagctatgaacatgccactgtactccagccagcataacagaggccttgtcattaagaaaaaaaaaaaaaggccagaggcagtggctcatgcctgtaatcccagcactttgggcggccgaggcggatggatcgcctgaggtcaggaatttgagaccagcctggccaacatggtgaaaccccgtctctactaaaagtacaaaaaagctgggcgtggtggtgcacacctgtaatcccagctactcgggaggctgacacaggagaattgcttgaaccagggaggcagaggttgcagtgagctgagatcgcaccagtgaactccagcctgggcaacagagagagactccatctcaaaaaaaaaaaaaaaaaagaaagaaaaaaaaagaactatgaaatatcaaggtccaacaacttgaaatctgtgttcacactatggtcctgcagtggtgtatcctggtgcctaagcagaagcaccaatcatcctcttccagtgtcacttggcaggtgtttactgagtacctactatgtgccacacaccattctggcatcagagacacagacaggtaaggtttttacacatgtggcagttaagagggagggagtgagacaccaaaaatacacaccaacaagaaacccatcagccgtggcagttgctctggggcaactggggtcacatgacagtgatggttagaaggctttttggaatttccatgtctctgaggtgacatcaaagctgagatcagaatgagaaggagaaatcaaccaagaaaaggactggagagaggtatggtttaggcagaagaaacagccaagcacaaaggccctgtgagaacacactgggttcagtactggctgtttgagaccaggctgctgagtgttaggggtgagggagagagctacgagaagttagactggcaagtggagattgactctaagggccttgaaagtcatggggacaactctggcttttgcttgcttgggttgggaactatggttggcaggataatggctcccaaaagggtccacatgcttatcctcagaaccctaaatatggtactttacaaaaaatgggaaaaataattctgccaatgtaattaagtttaaggaccttgagatggagagattaacccggattatctgggggggcctactgtcatcacatgacccttaaaggtagagaacctttcccagatgtgggcagagaaagtcatgatgatgtaagggttggagagatactatgttgctggccttgatcatggaggaagggaccatgagcaaggaatgcaggtggcctcaacaggctggaaaaggcaaggaaccagcccatgggctcactgggcaacaccttgattttagcccactgtgcccatgtgggctttctgacctaccgaaatgtaaaatcggtggctcatgcctgtaattctagcattttgggaggccgaggcaggcagatcgctggagctcaggagtttgagaccagcctgggcaacatggcgagacaatgagctgggacaagaggcacgcaccaacacacctggctaaattctgtatttgttgtagagacagggtctcgttatgttgcccaggctgcgctcagccaagagaagaatttcatggagagaagagtaatctgtgagaaatgctgctgagagatcaagcagaataagaacccagaagagaatctgaggctgggcacggtagctcacgcctgtaatctcagcactatgggaggctgaggtgggaggaccagtctaggcaacatagcaagaacctgtctctaataaataaataaataaatgaataaagagaattcggatttagcaacatgaaggtcataggtgactcagcggagagggaacaaggttgggagagaatgtggaggtgaggaggaagcggaagcagcaatcacaaagtctttgatgtttatcataagggagatcaaacaaacataacaggtgctaaaagacagggtgtgtgttaatcatgttttttttctttttctttttgagacagggtcttactctgttgcccaggctggactgcagtggccatgctgtgcccgaactcaagcaatcctcccgcctcagctcctgagtagctgggactacgggtggtgctaccatgcctggctaatttttaaaaaatgtttttgcagagcttaagtctcactatattgcccaggctgttcttgaactcctagactcaagagatccccccgccttggcccctcaaagtattgggattataggcatgagcctggactattaattatgttttttttttatcttgctttgacattgtggggcttggagtgactgcccttcccagggctagcttattactacagacagcaaacaacttgccaaagaacatgccattcatatgcaaatcaaccaatcaaaagcccacattcccaatcatcttcttcatttaatgctcacacacaaagccaataatttcccagccctaaatcaccccagggccaggtactgaccaactagagaccactcctctagcacagagcctgccaaaattatttaaactatctaacctaagcttgctcaaacttgcctgccatgccatgccatgcccattccttcctgaggaaatcactataaaagttctgggccgtgctttccctctctccactgtcgcccactgacccaggtgcttccccatgtggccctgcctggcatggtgtgccccctcctctggagctgtaagtaataaacttccctttcaacagggcagttgtctccatgtgtgtcatcttaccatacctgattaaaacaaatcccgggtacaaagcaaggccaaagggtaagtcaaaggggttttttttctttttttcttttttttctttttgagacagagtcttactctattgctcaggctggagtgcagtggtgcaatcatggctcactgcaacctccacctcatgggttcaggtgattctcctgcggcctccagagtagctggcattacaggtgcccaccactacacacagctaatttttgtatttttagtagagatggggttttggcatgttggtcagcctcagcctcccaaagtgccaggcttataggcatgagccacggtgcccagcctgttgtctttgactgttcttaaagataggaggtactagcacatgtttatatgccaaaaagccagtctagagagagaatttgatgatgcaaggatagagtaaatggccaggcgcagtggctcacgcctgtaatcccagtactttgggagactgatgtgggcagatcacttgaagtcaggagttcgagaccagcctggccaacatagtgagacaatgtctctgctaaaaatacaaaaattagccgggcatgatggcatgtgcctgtaatcccagctactcaggaggatgaggcaggataatttaattgcttgaacccagggggtggaggttgcagtgagccgagaacacgccactgcatcccagcgagcgagactccatctcaaaaaaaaaaaaaaaaaagaatagggtagctggtatgtgcatgtagcagaacttctgtgaacaactttgatgagtactatgctattaacatttactattatgatgattttaaatcctataactctgtcatccaagcgtccattattaaaagatccattattaaaagccacagctgaataatgtatctgaaaatcaataacttcacaacagaaatcagatttgattaacaccatgagaggttgggcatggtggctcatgcctgtaatcccagcactttgggaggctgagatggggggatcacttgaggtcaggagtttgagaccagcctggccaacatggcaaaatcctgtctctcctaaaaatgccaaaaatttgatgggcatggtggtgtacacctgtaatcccaactacttgctgaggcacaagaattacataaattcaggaggtggaggttgcagcgagacaagatcacatcactgcactcccgtctgggcaacagagcgagattccatctcaaaaaaaaaaaaggaatacaactggggtgcagaactaagatctttgtctctgaacttcaaatataaaatgtttgtgggggatgagatgacatatgaacttcccaaaatctaacctgaacattagtctttctttatttttaatttttatttttgagatggagtctcgctctgtcacccaggctggagtgcagtagcgcgatcttggcttactgcaacctccacctcccaggttcaagtgattctcctgcctcagcctcctgagtagctggaactataggcgcgtgccaccacactcagctaattttttatgtttttagtatagacagggtttcatggtattagccaggatggtctcgatctcctgacctcatgatccacttgcctcggcctcccaaagtgctgggatcacaggtgtgagccaccatgcccggccatgttagtctttcttataaggtatacagtcattgatcacacgagatattcagcttaaaatattaaacattttctttccatagaagtggtattaacattaatttaaatggactctgattatagctcatcttctggaaatttaactttttctctttaaaaaaaatatattttaatataaaaatagaagaaacctggggaacatggtgaaaccccagctctataagaaatacaaaaaactgtcagacacagtggctcacgcctggaatcccagcactttgagaagccaaggcaggtggatcacgaggccaaaagatagagaccatcctggccaacgtggtgaaaccccgtctctactaaaaatacaaaattcagctgggcatggtggcgcgcacctgtagtcccagctactcaggaggctgaggcaggagaatcacttgagcctgggaggtggaggctacagtgagctgagattgcgccacagcactccagcctggtgacagaacaagactctgtctcaaaataataataataataataataataataataacaataataataataatacaaaaagtaaattatctgggtttggtggcacatgcctgtagtcccagctactagggaggctgaggtgggaggatcgcttgaactcaggagatcaaggctgcagtgagctgtgatcacaccactgtactccagcctgggcgacagagtgagaccctgtctcataaataaataaataaataaataaaacagagacgggttctccctatgttgtccagactggtctcaaactcttgggctcaagtaatcctcccactttggcctcacaaagtgttaggattacaggcgtgagccttgtttctggcctggaaacttaattttaacaataagaggaaagaaaatgaagttggctcttctgcttctgtaaaggctctaggatttttttttttttttttttttttaccagttttctccttataaaatattttactttagatacagtagaaagcactttttaatgcatacaaagtaatttcatagtttctgtggcttactatgaaaagaaaacaagttcccaagctttgagcatgtctttgagctagcagtgatcaagcagctgctgcaaatcagtgaggaaaaggggactgactagtgagaccttccccaaggggatgaaatcacttacttggcagacacaccctaaggtaacccccagtgagtcatgtccttatataatcctttttccttgagttcaggaagtacctgtgacttgcaatgtgccaaaggtgatggtatcatctctgccatggttatgttgttatctaagactccaccttagatgactagagagtcacccactggcaccagctgccatgtcatgacagctggtggcaggaactgcaggcagcctctaaagctgagagcagcctcaactgacagccaggaagaaagcagggacctttgtgcttcaactgcaggaagtgaattcttccatcaaccatgcgacactgggagagaaccccatgctctggataggaacatagcccagccaacaccttgactgcagccctgtgagaccctaagcagaggacctagctaagctgtgcccagaatcctgacccaaggaaactgtgagataataaatatctgctgttttaagctgctaggcttgcggtgatttcttataaagcaatagagagttgataatgagatagactggaagccagagaatggggaccgttgggagaaaaatggggttggtgctggtatgtctaacaagtatatgacacgttatggctgggtgccgtggctcatgcccgtaatcccagcactttgggaggctgaagcgggcggatcacctgaggtcaggagttcaaaaccagcctggccaccagcctggccatcatggtgaaaccccgtctgtactaaaaatacaaaaattagccaggcatggtggcacatgcttgtaattccagctacctgggaggctgaggcatgacaatcacttgaaaccaggaggtgaaggttgcagtgagccaagatcgcgccactgaactccaggctgggtgacacagcaagactctgtctcaaaacaaacaaacaaacaaaaaacacaagtatatgacatattctaccaaatccacatatctgaatttttttgtttgtttttgagacagagtcttgctctgttgcccaggctggaatgcagtggcatgatctcagctcactgcaacctctgtctcctaggttcaagcgattcttgtgcctcagcctcccaagtagctgggattacaggtatacgccaccactcctggctaatttttatatttttagtaaaggcggggtttcatcacgttggccagactggtctagaactcctgacttcaagtgatccacccacctcggcctcccaaagtgctgggattataggcgtcagccactgcgcctggccacatatctgagttttttaaaatgctaatgtttatgagaaaaattcgaaaaaaaggaagaacagtaaatcttttaaattgacttccaaggagtcttctaacctaaacaaaaacaaaaaaagcccaaaaccaaaattctgaatatcatttttaaaccaatattcaaaatctatagcaaaacaattgagagtcatatagaaaatgccagaaagtgaaagcatagagctttatcccccttcaacctcatttattcaatatttatgggacaaacatttattgtggaagtaccatatgctggtccttgtataagggctaaggaacatgaaaatgaataaaaacataatccacattctggtatctaccaacagtatgttttagctgataattttagctataatttactttcccaaattatagaacaatctgttttcctcatcaaggtatcattttaaattacttgggaatttcatttaaagatatattcagagatttcagtccctatggaatagaatactacttgaaaaagtcttcctgaaagcaacaatgattctaacaccttaaccaaggatagatcgattatccttgattattctcagttctagaaggattattttagctgacaaaagcagtcagcaatattatacatctcctggagacaaacctaggtacaaacaaaaatttagaacttatgttccctgctcttaagaagtaaaactgcaggccgggcgcggtggctcacgcctgtaatcccagcactttgggaagccgaggcgggcagatcacttgaggtcaggagattgaggccagcctgaccaatatggtgaaacctcgtctctaccaaaaatgcaaaaatgagccaggctgtggtgaccagcgcctgtaatcccagctactcaggaggctatgacaggagaatcgcttgagcctgggaggcggaggttgtggtgagccaagatcgtgccactgcactccagtctaggcaagtgagaccctgtctcaaaaaaaaaaaaaaggaaagaaaactgaactcccacctgggcaacagagtgagactccgtctcaaaaacaaaacaaaacaaaacagaacaaaacaaaccaggacaaataccttagaaaggtcagaatactttgcaaagtacttacactgtacaagtctggaacaaaccgcgtgctcactccttacctggcaaggagttcaaggccatgcttggtcggacagcagctgaggcaggcagtcacccccgagtctcccttccaaggtcacgcccaccactcatgcccgatgggaccacaatgcatgccttcatgctccacgcctgccttgcatgcatgcttgcaccaagcctacaatgccgcatccactttctttgcctaggcaaagcctcaagtccagatcttggccatctcctcaaggctccttgtcccccgcctgacttcacctagactccagagtcatgcactctgattgcccatgctctacaagctctagtcttgctgaagggctaactcctcattgccctctctggtccccgtgtcaccgcactctccaatgtctgcctctccaaataatgaatctcctttcagaactcactgctgcattcccaagcccagcaccagacctggcacaaaatacatgtttattgagtagatgacatttaatttgcgagaatgtacttttaaaagtgtcctgtaaagcccgagcctgactgtctgatctcccacggcacccaatcagctgggctcctctgagcaggaagcgatgtcagatttaagtgagttttgtaggatccctgggaaaagcagagacaggtggcaggcagtacagcctcagagttcaatagagcatgcccaaatctccatccaactaccctccagttatctggccacttgattccttatctagaaacacagtgaagagccaggcgcagtagctcacacctgtaatcccagcactttgggaggctgaggcgggtggatcacctgaggtcaggagttggagaccagcctgaccaacatggagaaaccccgtctctactaaaaatacaaaattagccaggcgtggtggtgcatgcctgtaatcccagctacttgggaggctgaggcaggagaatcgcttgaacccgggaggcggaagttgtggtgagccgaaatcgcgccattgcactccagcctgggcaacaagagcaaaaatccatatgaaaaaaaaaaaaaaaaaagagccaggcgcagtgattcacgcctgtaatcccagcactttggcaggccgaggagggcagatcacgagctcaggagatcgagaccatcctggctcacacggtgaaacccggtctctactaaaaatacaaaaaaattagccgggcgtggtggcgggtgcctgtattcccagctactcgggaggctgaggcaggagaatggcgtgaacccggggggcggagcttgcagtgagccgagattgcgccaccacactccagcctgggcgacacagcgagactccgtctcaaaaaaactaaagaaagaaagaaaaacaaacagtgaaaaaccacccacttcctagggttctggggaggggtaaatgagggaaatccttattgtcatcatcatcaaccactgtgttctgatagaggcactcggtagctgtcatttaaatgagtgagtggtacttgctcctttgtgaaattctacacatggctttacttttcattaataaagctatttcaaaggggattttgccaaaagacttttagatagcttcagggaattgttttaaaactaacacaatttgccaggcacggtggctcacgtctgtaatcccaccactttgggaggctgagacgggcggatcacctgaggttgggagttcgagaccagcctgaacaacatggagaaacctcgtctctactgaaaatacaaaattagctgggtgtggtggcacgtgcctggaatcccagctactcggaaggctgaggcaggagaattgtttgaacccgggaggtggaggttgcggtgagcagagattgtgccattgcactccagcctgggtaacaagagtgaaactccatctcgaaaacaataaaaaatttaaaaaacttacaaaaaaataaaaacaacacaattcaagctgggcaaagtggctcacacctgtaatctcagcactttggggaatccgaggcgggataatcatttgaggtcaggagttcaagaccagcctgcccaacatggtgaaacctcgtttcaactaaaaatatgaaaattagccgggtgtggtggctggcgcatgcatgtaatcctagctaatcaggaggctgaggcatgagaatcacttgaacttgggaggtggaggttgcagtgagccgagattacgccactgcactccagcctgggtgatagagcaagactctgtgtcaaacaacaaaaaccaacacaattcaactcttaggaaaagtacaccaaagacagcaagactcctctggcactagaccaagtcaagctaagcctgcaagcaagctaagaagaaagactacaaggcacgaagtcaactggcatctaattaatctctttagggatactgaaaaagaaaattttaaatatgaaatcctacttcccaggtttggactgatagatcctctcatgctaatgctatctggctctgggaaattccacatcataaattccccctagaacccttgcattctttgaatgggtgtgcggaaggctgaatgctcactgacatgctttataactatgtatgaatataaggtcagaacatacataagtatacatactttataagtatatgtgttctgaccttatattcactattgcaaaagtaccaagcctaggggaacacatttcaggtatcagttcacaccttgcctcttcagtaagtttaaaggatagtcaaaatcacttcattatctccccttcataataggaatttaatccatatctaggcaaagtcaatctgcagaaatattggagggactaagaaagttatgcaaatctctactagttgaggtcataatagtaaaaatcaaattaaaaagagaaggccgggcatggtggctcacacctgtaatcccagcactttgggaggccgaggcgggcagatcatgaggtcaggagttcaagaccagcctggccaagatggtgaaaccccgtctctactaaaaatacaaaaaatagcctggtgcaatggcaggtgcctgtaatcccagctacttgggaggctgaggcaggagaatcacttgaacccagggggcagaggttgcagtgagccgagatcatgccactgcattccagcctgggtgacagggtgagattctgtctcaaaaaaaaaaaaaaaaaaagaaagaaaagttcagagatatgttttcttcctaagaaaacctatgcaggcattgctgggttgcctaaaaccaacttccaaatacatttttggttttaggtatgccatctcacacaccacactgcttgctcctaaaacattataacagtgagcatttagaatgggtgggatggctcatgactgtagtcccagcattttgggaggctgaggcaggaggacagcttgagcccaggagttcaaaaccagcctgggcaacatagtgagactctgtatctacaaaaaaatgttaaggccaggcacagtggctcatgcctgtaatccctgcactttgggaggctgaggcaggcagatcacctgaagccaggagttctagaccagcttggccaacatggtgaaactgtgtctctactaaaaatacaaaaattaagccgggcatggtggtgcatacctgtacacacctgtaatcccaactactcgggaggctgaggcagaattgcttgaacccatgagacgagggttgcagtgaactgagatcgcaccactgtatcccagcgagggcaacagagtgagactctgtctcaagaaaaaaacaaaacaaaacaaaaaacccaggtttgaagagagagctatattttccttctgaaaacaaacttacggcaacaaaacatgttcagagggcctcacgactgagatgaaaaattccttcttgctaaacagttgagttcaactgactgctggggtgataaaaggggtgactggcacattgagagtgggcaggatcagaaagattttcaaaagcctcacaggatcagttgatcagaagagacaatctgcttcccagcccaggttggtaatctaccaggctgcagggtttactgtgaggagctgtatttcctccagaggggtggaaatagcccatttgaggatggatgatttttgtctggacttgagtgaactttagggctttgagttcatctaaaggctaggtccaaagaaatgagggagatttgaagcttcaaagtctcgaaataaaagccccgggggtcatcccaattcagaaagaggccagaaaccaggaaccagctacctaacacctgtgttatcaagcatgaataacgccccccaccacaccatttaatttcttttttttttttctctgtcatccaggctggagtgcagtggcacgatctcggctcactgcaacctccgtctccagggttcaatcggttctcctgcctcagcctcctcagtagctgacacatactacaggtgggcatcatcatgcccagctaatttttgtatttttagtagaggtggggtttctccacgttgcacaggctggtctcgaagtcctgagctcaggtgatcctcctgcctcggcctcccaaagtgctgggattacaggcgtgagccactgcacccagcctaatttcttagccttaaaacaaaaagagctatctttgaaaatggtaaagaagtaactggctggcagggcgtggtggtttatgcctgtaatcccagcactttgggaggccgaggtgggaggatcacctgaggtcaggagtttgagagcagcctggccaacatggcaaaaccccgtctctactaaaaaaataccaaaattagccgggcgtggtggcaggcgcctgtaatcttagctactcgggaggctgaggcaggagaatctcttgaacccaggaggcagaagttgcagtgagccaagaacacgccagagcgagactctgtctcaaaaaaaaaaaaaaaaaaaaaaaaaaaagtaactggctgcattccattctaaatctaaagcctgtctagggaaactagaatctcaggagattgctgcaaggaaaatgcagcagccctggggctgtgctgggcctgaggaaggccacatctgagcagagctcaccccttaagcagcaatatcccggtctggaaagtacaaaagtagcttccaggacacacccaaagctctgcctctgcggtgacattcctgggtgtgtcaaaaccatcttccccctttcccaactcctactaatccctctagaatctcctcagtgtcatgaaactactgaatgcaaggtgctaggcattgatcctggctctgggaacacaaagtataataaagccactgctctccgactagcctaacagacatcacggaaggcaccctctcctggcacagctcttctgtgctaggaattacctctacacagcacattcctgttataacaattatttacaagttggtctcccacacaccctacttctcagtgggctccaagaaggcagagaacatcttagccatcttggtttctctagcacctggtacaatgctccaaaaagaataaaaacactggttcacgtctgtcatcccagcactctgggaggccaagatgggtgaatcacttgagctcaggagttcaagaccagcctggacaacatggtgaaaccccatctccacaaaaaatacaaaaattagccagccattcattggtggtttgaggctgtagtcccagctacttgggagactgaggctggagaatcacttgaacctgggaagcagaggttgtagtgagttgagatcataccacagcactccagcctgggtgacagaataagaccctgtctcaaaaacaaacaaacaaacatggcccggcgcagtggctcacgcctgtaatcccaacactttgagaggccaaggcgggtagatcatctgaggtcgggagtttgagaccagcctggccaacatggtgaaaccccatctctattaaaaatacaaaaaactagccaggtgtggtggtgcacacctgtaatcccagctacttgggaaactgagatgggagaatcacttgaacccgggaggcggaggttgctcactagccgagatcgcgccactgcactccagcctgatcgcgccactgcactccagcctggacaacagagtatgagactccgtctcaaaaaaacccaaaccaaaccaaaaaacagccaaacaaacaaacaaaaacaaacaaacaaacaaaaaaccacaatgaaaacagttggaggagccaggctcagtggctcatgtttgaaatcctcgacctttggaaggctgaggcgggaggatttcttaactcaggagtttgagaccagcctggccaacatagggagacctaaaaaaatagaaagattagtccaggtgtggtggctcagggctgtaatcccagcactttgggaggccgaggtgggtggatcatttgaggtcaggagttcaacaccagcctagccaatacggtgaaaccctgtctctactaaaaatacaaaaaaaaattagccaggcggtagtggcacacgcctgtaatcccagctactcaggaggctgaggcaggagaattgcttgagcctgggaggcagaggttgcagtgagctgagactgcaccactgcactccagtctgggtgacagagtgagaccctgtctccaaaaaaaaaaaaaaaaaaaaaaaaaagaaagattagccaggcgtggtggcacaggcctgtggtcctagctactcaagaagctgaggtgtgaagattgcttgggcccagaaggttgaggctgcagtgagtcatgatgacactactgcactctagcctgggtgacagagcgcggccttatataaaaaaaaaaaagccaaagaaatagttgtatggtgacaaggactctaatttctcaaacagagcatctgaaactacaaaaagtgtcaacattccctgagaagcaaaggaaagaaagtttgaagaacaaatttactttctctccccaaaccatgaacttgagagcaggaagaacttgagagctatgccagaacccagttcagtacccagatattgtaaaggtccgataaatatcggccaaatttgttaaaaattcattgaagaacaggccaggcacagtagttcacgcctgtaatcccagcactttgggaggctgaggtaggcagatcacctaaggtcaggaatttgtgaccagcctggccaacacggtgaaaccccatctctactaaaaatacaaaactagccacgcatggggcgtatgcctgtagtcccggctactcaggaagctgaggcaggagaatcgcttgaacccgggaggcagaggttgcagtgagccgagatagcgccactgcactccagcctgggcaacagagtgagagtccgtcacacacacacacacacaattcattgaagaacaaatgcatgcattatccacctttttatctgcctcttccttcctaggactgctgtttacctggctttgtaacccctccccactacagggctctagtgggtacacagtccacaccaccagaccctagtcccatacccagagaccgtccctcaccttacaacagtccccattcaacaaggcctcatcctccaaaaggacttcagtcctttcctttccttttctgtaataatcactgcaggacccagacacagtgggctgccttgtgaagcagattctacggatcctggctggctgacaagtggtgagtggaggtaaacgggatgggaggtctaaaaactcctttatttttccccattgcaactggaataaatagtccgaactccctattgattgttatccagatgacaaaaacaaaactatttttttatggagacagagtctcactctgtcgcccaggttggaatgcagtggcgcttgaacccaggcacctcctggattcaagtgtttctcctgcctcagcctcccaagtagctgggaccatagacatgcaccaccacgcccagctaattttcgtatttttagtagagatggggttttgccatgttggccaggctggtctcgaactcttgacctcaggtgatctgcccaccttggcctcccaaagtgcagggattacaggtgtcagccactgtgcctggctgaacaaacaaaactctttactgagattcgtaggccccatgtaattgggttccagtctccctttattattattattattttttgttcagacggaatctcgctctgtcgcccaggctggagtgcagtggtgtgatctcggctcactgcagcctccgcctcccaggttccagtgattctcctgcctcagcctcccaagtagttgggattataggtgtgcaccactacacccagctaatttttgtatttttggtagagactgggtttcaccatgttggccaggctggtattgaactcctgacctcgtgattcacctgccttggcctcccaaagtgctgggattacaggcgtgagccaccgcacctggccccagccttcctttaaactcaactctttccctccctggctaggaactttctcttcccagccagactccgctttttacatcctctttcccacctcagggcctctgaaggtgctgtcctctccaaagatgttcttctccacctggcttcctatagcatgcaacccctatccctacagcttttattgccatttattttatttttttcttttctcagattggtacaggatggtctcactatgttgcccaggctggtctcaaactgctggactcaagtgatcctcccactgggaggcagctgggattacctacccatgctaccatgcctggcttatacttttttgcttttgtttgagacagggtctagctctgtcacccaggctggagtgcaatggcttgattcggctcactgcagcctcagcctcctaagtagctgggactacaggcttgcatcatcacacctaactaattttttaattttatttttagtagagacgaggtcttactacattgtccaggttggtctcgaactcctgagctcaagcaatcctcctgcctcagcctcctaaagtgctgtgattagagatgtgagccactccacccagtccttattttttgctatttacattccctcccctaaatcatgtactcgagagcagggactatgtcagcacccggttccctatccagttattgtaaggattcaataaaaatttgctgaattcattaaaaagaaaataggtcttccatctccacccactcctctactaacccttttcccaaaagttctcgatggttcccacaccaagttaccccagttcagttcttcagtctcctgcagacattcctgagtcccattcccagccactcactctccatcatctgccctggaaacttcccacccacaggccgggctcggtggctcgcgcctgtaatcccagcacttagggaggccgagacggaatgagtgcttgaacccaggagtttaagcaactatagcgagacccctgtctctacaaaatatacaaaaaaatcagccgggcgtggttgcacgtgcgcctgtggtcccagctactcgggaggctgaggcaggagaatcaactgagccggggaggtggatgctgcagtgagccatgatcacgccactgcactccagcctgggcgacagagcaagaccgtgtcaaacaacaacaaaaaaacttccagccgcaggagtcccattaacgtacccatttagtcattcactcgtcaaaagtcccgtacgtgcccatttctcagccctactccctaaacccctaaacccaaccttctcgccccaagatgagctgctgaaaatccttcacgccactgctcggccccataaggcctatccagcccgttccgtttgaaccccatacatcccttcgtcctcgggacccccctccagccctcctcaagcgcccctcgtcagtctggcctccacgccccgtcccctcagcccgccaacctcactgccacgaccctgcgtggcccctgccgagcccgcgggcagcacctggcctgtgcctcgtccaggctctggtcggtgatggccatgatctgctgcaggacgtcgctcgtgtcgaggcgccgcggggcggggggcgatggcgcggggcgcggcggggcggccatgagcggcagggccgggcgggcgctgtgagggtgccgtcgagcctggagcactaccactggcgccgcagccaaccgccgctgcctgagcgccgcgcccgctctcgctcgcgcctaagccacgcccaccgccgctatcgccagccaacccgtgtattgcaccgcctacagacacgccccttcatctccgtcagccaaccggcgccacgcaccgcccccgggactcgccccgaacttccccctctccgggcttggactgggtttggggttgccgaggcaacggcacttctcataagcgccctccttccccttgagagagggcagcgctggctccgctccagccagaggcccccatccctcacatctcgcgcggtgcacgcctccttcagccccactcgcatctcctcagagttcctgctcctcctcagggcccccttctcctcaaagccctcggtcctcagagaccctcactccccagagcaccccaactcttcctccaagccaccccctcctcctcagaaccccacacctcttatagcttgatcgacagcccccattcatttccagaagccccaagccccagacccctgctcagtccccctaatgctccctgcatcctcagccccatcaggtgggccactggggcccctggctcttcctctagagctttccacgccccgttcacctggctaaggcggggcgcaggcgtgcgtggttgatggcaacgaggaggtcagaacgcagcgcttttctccactgcagaaatcaattccagtcacctttcaaggtccagctgaagagtgacctcgcttgtttattcatcttcgcagattacagttctgggcatagaaaatgctaccacgtggttaccgaatgaaggaaggatgtttactgagagactcccctgcagtgtaccccaaatcagagcgaatcctcacatctttgtttctagtccttaggacacagcatcgaaggctcctagtgcacaagaaaaggaactgggcggtggctcatgcctgtaatcctagcactttgggcggcagaggcgggaggatcacttgagcacgggagtttgagaccagcttgggcaacatagtgagaccccgtggtggtgcacgcctgtggtcccagctatttgggacttgagaggctgaagtgggaggatcacttgggcctgggaatttgaggctgcagtgagccatgattgcaccactgcactgcagcctggttgacggagaccaggtctcaaaaaaaaaaaaaaaaaaaaaaagtaatggcctggacatgaatctcttctccaaagtcacagaacctcctggagcctatttgctatgaggacagtctccagatgtgggctcagtaaaaggtcctcagcctgctggctgggagcccttccagggtggggcccacgttctctccattgctgctggggaggaaattcaaacaccatctggtatggctggattggagagcgtcgggagactccaaaggggacggcagggagtgaaaaatgaaagacattgaccgagtgtctggacaatagggaaagctctctgatgaaggaaaccgacacttggctccaatgacagaaagtaatagattgcatgggagccacggagaccagtgcctgttcaaaaggtcacccacaagcacagcactgcccaggaggcctgaacagtagtggccttcaggctgggtgcagtggctgacacctatgatcccaacactttgggagtctgaggtgggagattacttgagcccaggagttcaagaccagtctggggaacatagtgagaccccatctctacaaaaataaaaattaaaaaaatagctaaattagctggtcatggtcccagctacttgggaggctgaggcgggaggataagttgggctcaggaggtcgaggctacagtgagctgtgtttgtgccactgcactccagcctgggtgagagagcaaaacctgcccccaaccccaacaaagtagtatccttcagagaacttggaggggtgggcactgaaagcttcagggaccagcagagacaaaaatttgaagccacttggtggagacgggagatcgacaagaggaaatggtctcgaaggagacccacggggtgcaggttaaaacctggaggagctgatgtgaacagccagctcagagcgcctgagacagagttgccttttttttttttttttttttttagacagaaatcttactctgttgcccaggctggagtgtagtggcgtgaccttggctcactgcaacctccacctcctgggttcaagcacttctcctgccttagcctcctcctgagtagcttacaggcacccaccaccacgcccggctaatttttgcatttttagtagaaatgaggtttcaccatgttggccaggctagtttcaaacttctgacctcaggtgatctgcctgcctcggccgcccaaagtgctgggattacaggtatgagccacctcacccgtcccactgttgccatttggaggtcatcaggggtctctactgcatagaaattagttggcagccttggcactcaaagtgctcggccagggccatttaatatagaaggacctgggagttttgggttctttgacaatgcatatttcagtggtttaagaatttggcacaggtggctgggcatggcggctcacatctctgagtgacctgggttcaaattctagctgttattcagcatgggattcaaaagtagggacataaccccacctcctcactggtgaggtgggagcagagaatgacatcctggcacacactgtgccttggagggggcctccctgagcatctcagagggggctcatgatggatctggcactcatgggttgggtgctgtggggtgaggtagggaaagcccagctgagcttgggaccaaccctgggcttcgtgggaatctgaagtccctttcctaggggcctctctggtccctcggggcctgtatgtgccatctccaagctgtgtttaccatgggccagatcacaacctgtctgaatcagtgttctcacataaaaatcagaaagactgatcccagcactttgggaggccaaagcaggcggatcatgaggtcaggagttcaagaccagcctggccaatatggtgaaatcccatctctattaaaatacaaaaaattagccagacatggtggtgcatgcctgtagtcccagctacttgggaggctgaggcagaagaatcgcttgaacctggagggggcggaggttgcagtgagctgagatcatgtgagactctgtctcaaaaaaaaaaaaaaaaaaaaaaggccaggcatggcggctcacgcctatagtcccagcactttgagaggctgaggcgggcggctcacctgaggtcaggagttcgagaccagcctggccaacatggtgaaaccccatctctactaaaaataaaaaatttagctgggtgtggtggcatatccctgtaatcccagctacccgggaggctgatgcaggagaatcacttgaacctgggaggcagaggttgcagtgagctgagatcacgtcattgcagtccagcctgggaaacagagcaagactccgtctcaaaaaaaaaaaaaaaaaaaagcccagcacagtggctcatgcctgtaatcccagcactttgagaggccgaggcgggtggatcacaaggtcgggagttcaagataagcctggccaagatggtgaaaccccatctctaacaaaaatacaaaaattagccgggcacggtggcaggtgcctgtaatcgcaactacttgggaggctgaggcaggagaatcgcttgaaacccgggggcggaggttgcagcgagccgagattgcaccactacactccagcctggaggacagagtgacactccatcacaaaaaaataaaaaatttaaaaaaaaaagcacctaaagtgtttaccagtatgccaggcacatcagaagagcttgagaaatggtcatgctcaaatcctgcatcccactacctgaaccccacaacctgtggctggaagtatgaatacaggtggtggggaatgggatagaaacggctgggcacgtgaccttgaaccatcagggctcaaacaaaagggcagtggggagggagggggctcatagggtccagacactactctgagctgcagagaaagacagggagacaggcagtgagatggaggcagagcaacagatgggggaaacaaagaacagaagcagagagaaacagattcaagaccccagtaagagagaggggccaggcgtggtggctcatgcctataatcccagcactttgggaggccaaggtgggtaggtggatcgcttgaggtcaagagttcgagaccagcctgactaacatggtgggaccccatctctactaaaaatataaagattagtcaggcacgcggtagctcacacctgtaatcccagtactttgggaagctgaggtgggtggatcattcaaggtcaggagtttgagacgagcctggccaacattggtgaaacctcatctctactataatacaaaaattagccgagtgtagtggcagatgcctataacccagctattcgggaagctgaggcaggagaatcgcttgaacccaggaggcagaagttgcagtaacctgagatcaagccactgcactccagcctgggtgacagagcgagactccctctcaaagataaacaaacaaataaataaataataaaaataaaaatacagagattagctggacgtggtggcacgcgcctgtaatcccagcttctcctgaggcacaagaatctggaacctgggaggtagaagttgcagcgagctgagattgtgctactgctctccagcctgggctacaaagtgagactctgtctaaaaaaaaaaaaaaaaaaaaagagagagatggaataacagccagccagactgaagaagagcgagcacagggccaaggagataccatgttgaaagatcctttctggacttgggccaaggtagacaattccgggacacagggacagaaacactgaattgataacaacaaatgttttggagacctcagagtgtaaagaaaggtttactccttgtatcatcccctccccgtggactgcttcaattctatcggggacaggccagtccctggaggctgcaaggagccacaaacctttcccagctcacactctgcacccctcagtctctgctgctaaagaatcagactcaggtagatggggtgtccacagtctgtcctcattacccagtcataccgggtagcatggcccgagagagcccttatctctccccaccttaaaaccctcagcatcacacagcaggaaccagtccacagggcttaccaaggatacgcagtgaaaacagaataatgtctgttacaaaccccctaaacctgagatggctgaagagccagattcctgcaccccatctgactcccccaggcagtgggagatgacccaaagcccccattccctgggcagagtggtgtgcctggggaggcctggcagtggtgctgtgccatgccagaccttgtcctgccagtcagtcagtcctgttggttgggttgagccaggagcacccacaagtcatcaggggctgtggatttgttgcttgccgcgtaccgctgaagttcaaggtagctaaagggtggagtccatcagtgggtggccgttctcgggaagcatgatgcgagtgctggcacctccctgggcagaggatgtatagtggacagactcgcgggtggactggcggaggcacgcgcagcagagaaggcggcggaaggtgcggcgcatctcagcatctcggcaagagtacacagcagcattgaccagggagttggcctcggccaacagtaggaagtacttttctacagccaggacattgcaggactcacagcctaaaccatccaggagcagtaccacctggcctggtgtccagcagaccacgaacgcccctgtgggacagaggcggaagtgagcagggcaagctgtcagaggcccggcacctacagctctcagtttggggttggagtggtctccagagctcgagcaatagtggtgaagtttgcagtgcaagagctgcttgtttccctgattctgcagtgtgacaggaaggcctgctaagatgggacatctatgctaattggtacacagtggccaaggcactggacattttgtgtgtgtgtgtgtgtgtgtgtgtgtgtgtgtgtgtgtgtgtgagatggagtctcgctctgtcgccaggctagagtgcagtggtacaatcttggcttgctgcaacctctgcctcccaggttcaagcaattcccccacctcagcctcccaagtagctgggactacaggtgtgtgccaccatgcccggctatatttttttttttttgtattttagtagagatggggtttcaccatgttggccaggatggtctcgatctcctgacctcgtgatccgcccgcctcagcctcccgaagtgttgggattacaggcatgagccactgcgcctggcctgtgtgtttttttttgagacagggtctccttctgtcacctaggctggagtgcagtggcacgatcacacctcactgaagcggcacgatcacacctcactgcagcatttgacaggctgaggcaggacaatcacttgaggccaggagtttaagaccagcctaggcaatatagtgagacctcgtttctacaaaaaataaaaaattagccaggtatggtggcacatgcctgtagtcccagctactcaggaaactgaggcgggaggatcacctgagcccggaaggttgaggctgcagtgagctatgatggagccattgtaatccagcctaggcaagagtaagatcctgtatcttaaaaacaaaaataaattttgaaatttaaaaatatgggccgggcgtggtggctcatgcttgtaatcccagcactttgggaggccaaggcgggtggatcacgaggtcaagacatcgagaccatcctggccaacatagtgaaacctggtctctactaaaaatagaaaaattagccaggcatagtggcacgcacctgtagtcccagctactcaggaggctgaggcaggagaaccacttgaacctgggaggcagaagttgcagtgagccgagattgcgccactgcactccagcctgggtgacagagcgagactctgtctcaaaaaaaaaaaaaaaaaattaaaaatacatatagattaaaaaacaatttaaaggctttttgttaaaacaggcttagcactgctaaaaactccttttttttttttttttctgagacagagttctggagtttcgctcttgttgcccaggctggagtgcaatggtgtgatctcggctcaccacaacctccgcctcctgggttcaagcaattctcctgcctcaggctcccgagtagctgggattacaggcacacaccaccatacctggctaattttgcatttttagtagagatggggtttctccatgttggtcaggctggtcgtgaactcccaacctcagctgatctgcccgcctcggcctcccaaagtgctgggattacaggcgtgagccactgtgcccggctagcactgctaaaaactcttaaggggttcccatgaaactcaaaataagactcctgtccgtgccccttaaggccttgctgatctctcctcctcacaagcccactttcctctttagaggctctggcctcgtactgccttgaggtttttactttccgtttcctctgcctggaaggctctctgttcctatcctcagcattcaggcctctgctcacatacattatcacctccttggaggacattccccacctaaatcatcccccatcaccctctatcaggtagcttgttttgttcattgcttcgcagtgtcttgtgggagatagggggaagcagggtccctgttgccccctgggggccccacttacccaggatgatgacaacagtcttgaccaggctgagcgtggtctctcggtagcgggggtggcagctgacatgctctgccatgcgctgcactcgccgccgcacgtagaagaaaatgcgggtgtacacagccaccatgagcaggaagacaagcaggctcgacagagcccagacggccaaataggagcggctgagcaggggtgccatgcgtgagcagcggtccagggcacagaggcagtgccaggagtgggcaggcagcagccccaggcccagggcagccacccacacgcccacaatgagcatgaccacgcggccacggggcaggcggctgtgcagctgcacggccatcacactgcggtgccgctccacggcgatggccagcagtgtggccaccgacgcagtgaggcttgtgtccagcaagccctgccgcaggaaccagccctcaagtgaaagtcgggctgtgcggggaccagtgtggaacatgaggaagaggtaggccacgcccgcgaagaggtcagccgcggccagattgccgagcaggtagtagatgggctggtggaagcggcggttggaggcgatggctgctatgaccagcagattggtcagcagcaccagcacgctgacggtcagccccagtgccaccacgaccacatccttgggccgccagtgggagctgagctctttgccactgttgttatagaagaagccgatggtctcgttgtagtagcactggcccatgatgaccatctggggacacaagagatcagtgcatgtggcacttcttggaaggacacagggaggggcggcagctgcagaggagggtcagcgcaggaaggacaagggtctcaaattcagatacctcgaagcaaagtggcagtggtgaggactacggtggcctggaaaaagcaagctccatggggctggggtggaggtggaggagcagctgtttcttacctactaataagacctgtgtgcaagacatcacccaagtcaataggtttttgaaccagaagtgaaacaaaacccatctatggtcgaatcccagcccacctgccgccaatgtgtgacccggtttgggttgtggggagaggagggttagggaaagacaaaggggtgtgagctgcgggaagagatgagggaggatcactttggtgccggagtcagtgtagggagcagagacccgggagcgtgtgcacacaagggtgaggtcacttgctagaaccctgcgagggggcggtgccgaggcgtggaggtgatcggagtggacagagaggcggccccagaagttagtcggcgggatttgggcgcgagtgcttcccaagcgggcggggcaataggctgttccgggtgggacggaggacactggcggtctccgggacaaagacagcggttggggaagggatggatggccgggcctccaggcgtctccagactggggaaggggtagggggttaagggatcagagggcggcgtcctggccccgcaggcacgtgccgcgcccttcccccgggcccaggcccgcacccgcccgcctcccgtccgtgcaggcctcacctgggcctccagtcacgccgcagacaaggcgggctcgcgggggttcggggcgggctcgaggcccatggcccggcgactgcggcgggagcggtagagcgtccgggtgcgccctgtgcgggttgctgagagggcgcgggaggcggggtctccccggcgccccgcccccaccacctgggggagccctgccccgccccgccacctgggggagccccgcctccacggccgcgtcgggggcggtgtcgcccggaaccgcagcccccctgtttcctccccgcctcgcggcccctcagtcgcccctatttccggcgcgggacccccaccccggtacctgcacacctcatgcgcccgcagtttcgagcctgcggggctgagtcactcggcgacccgaaaattcccgccgtgaccccgcgctgcccgggcggagctccaggtggtcttgggtccgcgcccccgctccggacccccaaccctcccagccccaccccgctctcttcttcgtgtccaatcggccgccgagttacaagccactccctgatccgacttggctcccaccgcccggacccccgcccagcttcggctttgccagctcgcagtatcagcgagccgcggcctcctgtgcgaggcccacctctgcggccccagctgatcatcgggcgcacgctagggttttgcaatcccgcccccgtacccctcaccctgggacagcgctgccccctgcaaagcccggccctgccctgccctgccctgtggcttcctccctcggcctccctgcggcggccccgggctcccacggtccggagcacacagccccattgtcccggttatcggtactttgttatactgtatttgattatgcaggaccggatcggggacgcagagctccgggagggccgggctggcgtgactcagccgggtgctgcgacccagctccaactgcctttacgtaggtgctgcagggtgtttgatgatgcaagaaggaggccttgaggccgggcgcagtggctcacgcctgtaatccctgcattttgggaggccgatgcgggacgatcacgagatcaggagatcgagaccatcctggccaacatgctgaaaccccgtctctactaaaaatacaaaaaaattagccgggcatggtggcaggcgcctgtagtcccagctactcgggaggctgaggcaggagaatcgcttgaacccgggaggtggaggttgcagtgagcggagatcgtgccactgcactccaacctggagacagagcaaaactccgtctcaaaaaaaaaaaaaaaaaaaaaaaaaaaagaggccttgattcccctaatctgtaaaatgggggcaaggagtgctacccatgctggcctctcccctagcagagatgcacccaagggcatataggacacagtttattagaggccatcagacctcaggcaccaccagcatgtggagtctgagctgcccacctcctccaggaaggtcacttcgagtccgtgaaggaggcaggcaggtgtgggggagtgaccacaaccaaagtagcaaaagcacccctgtcccaggtgtcagagactagggtggaccccaaggatctcataacctgcactgaccctgagtattgaccctgagtgacctctgagcccgagtggccctgatgcttggcagtgacctgtgtctagtggggggactctgggacattatccccaaaagggttttaggcctcccctaggtcatgtattaaatagtttttccttataggaaccctctggacctctcccagcattgaactcctggcggggtgtttggccactaggtggtgggaggtagggatatatgggtccgtcttcacaatctgggcctcttccttatttaaggtgccagggtggtcagagatggtcctcggcttcctcaggctggacgtccgggcagcaggtggccctgggcacagcctcgctgtccaatttcgagagtagccgggctgtctcctgggtaatctcaaaatgcttgggcagcggggtgcggcgcagggggctgccctcaggggaggcagctgcagggctgggcccccgcccccgcaaactccctctgggcactgatgtgatgggggtctcctcgcacagcttggaagccaccagggccagactggacagctggtgggttacaggcctcacaccgccccggggatacttcactggctggcggctgaagtggccacgagactgtgtccccaggagtgagtcctctgggccttggctggacactgtgtacggggtgggtggtcagtgcagagcacctccaagttctctgtatatccccccaggagtcatcttttagcaagccaccctggggccagggcacccccagaactcctgagcctctctctaacatactcaccttcccctcccccatctttggtgtcttcagccacgtcctctctctggtcactctgtggagttggaatctgcagggagaaacccaagaatgagaccccaacactaaaatcccagttctttgagattcctggagagccaagggcttgttcctggacatgcaaaaggaatagccagtgcaaaggccctgaggtaggagcatgcctggtatgttaggacgcagccccaccctgtaatgaatgagggaaaggtggtaggaagtgagaccaaagaggagtgggcccaggtggctctgccagccacccctgactttgcacctactctgcactgggtgtggactaccattgaactcctcctatgcacagggcatggaccaccactgactgtgcacctgtcatcctttgcagttttggtgtttggggatagacgatgcccttataagtgtactgcttggccaggcatggtggtgcatgcctgtaatcccagcactttgggaggctgaggttggtggattatctgaggtcaggagttcgggaccagcctggccaacatggtgaaactccgtctctactagaaatacaaaatttagccgggcgtggtggtgcatgcctgtaatcccagctactagggaggctgaggcaggagaatcgcttggacctgggaggtggagattgcagtgagctcagatcatgcccctgcactccagtctgggtgacagaatgagactccgtctcaaaaataataataagtgtactgcttgcccttccagcatagagcagtgtcattcattgagtctggaccgtgggctccatgagggtgggaaaatccttgtttagcaaatggccagcccagggagtggctcagccctctccacattaggaccaggtggtgcctctgaactactatcctgggctgctctctgcaaccttaccaactttactgttccatccttagctaaatggttggcagtgtctacacatcagacactgtcccgagcactttatgaggcattccagctctcagagacccacagttcaccagcagccgcttcccagctctgggctgctgcaggagagatccttgctctcaggaatggcagatgcagcaagataccagcagcacaggccttgggcatggactgttctagcaatccggagcagcgggtgctgctatcttcctggttcacagctgagctctggatccagactggtgacctttgttaaagattctacgccaggcggccgggtgcagtggctccagcctgtaatcccagcactttgggaggccgaggcgggtggatcacaaggtcaggagatcgagaccatcctggctaacacggtgaaaccccgtctctactaaaaatacaaaaaaattagccgggtgtggtggcgggtgcctgtagtcccagctacttgggaggctgaggcaggagaatgacgtgaacctgggaggcagagcttgcagtgagccaagatggcaccactgcactctagcctgggtgacagagcgagactccatctcaaaaaaaaaaaaaagattctaggccgggtgcagtggctcatgcctgtaatcccagcactttgggaggctgaggagggcggatcgcctgaggtcaggagtttgagaccagcctgaccaacatggagaaacccctactctactaaaaatacaaaaaaaattagctgggtgtggtggtgcatgcctgtaatcccaactactctggaggctgaggcaggagaatcgcttgaatccaggaggtggaggttacggtgaacagagatcacgccatcgcactccaacctgggcaacaagaatgaaactccgtctaaaaaaataaaggattccaactgcggccgggtgtggtggctcacgcctataatcccagcactttgggaggctgaggtgggtgggttacttgaggtagggggttggagaccagcctggctaacatggcgaaaccttgtctctgaggcattagaattgcttgaacccgggaggcggaggttgtggtgagccgagatcgcaccactgcactccagttgggcaacacagtgagattctgtctccaaaaaaaaataaaagattccaactgcttacagtccccttttagggccattaactgctcagagccttcattgtttaatctgtaaatgattttcattaacactgtctacctctcaggactgtggagaggacaacaggaagcctctatagtgtcccctgcacagcaggtgcacattcagtggtggtctgtgcctgtgaatagcagatgcaaggtcaggatagctggcagagccacctgggcccactcctctttggtatcacttcataccaccttcctgtcattcattacaggatggggctgcgtcctaacacaccaggcacgatcctacctcagggcctttgcactggctgttccctttgcctggaacacccttcacctgatctccatgttgccagctcactccttcatgtccttccagtctttgctcaagtccgtctgctctctaagacgtgcccccaccatcctacttagtgatacaaactccacctcccaccgtgctgctccctggtgtcatgtgtcttactccactttttttttttttttttgaaacaaagtcttgctctattgtccaggctggagtgcagtggcatgctctcggctcactaaaacctctgcttcctgggctcaagcgattctcctgcctcagcctcctgagtagctgggattacaggtacacaccaccacacctggctaatttttgtatttttagtagagacaggtttctccttattggttggattagtctcgaactcctgacctcaggtgatttgcctgccccagcatcccaaagtgctgggattacaggcgtgtgccaccgcgcccagccattactctaccttttcatgatccattacccttatcatcatcacctcatcacattccagataactgactttgtgtcatgtatatggttgttctttccccactaaaacacaggcactgagagggcagggtctttggatatttagctcctggatgtatctgcaatgcctacgacaatgcttggcccaaaatacatgttcaataaatattctgttggaggaatgaatgatcacccatgttagtacctctgcagggctgtccccttttgttacatcatcactgcccactgctcattcctcactattccttccagaatgaacataagttaaatgaggaagggaggaagagaatgaaggaaattttaaaaaggaaggaaggtgaaagagaaggtaagagaattgaacagagataaggccctctccatagctgtgggcccagtgggttcttacctcggtaggtgtggccgtgggatgctgctccagggtactgtggtgctgggggtctgggccggggtctgaggctaggactgggggctgggagtctgggtcaaggtgcgggggtggcggttgggagctggttgtgaggggcccaggggctgggctggagtcttggggcgggggctcagtggcctgggggagctcatccatcccaaagatctgctcgtagtgcacgatgaggaactccacaagctgggcctgatgcccagagtccagcaggcaggtgacagggatggcgctggctgcccgcgggccgtccggcggccgcagcagtgtcggcccaaacacaatgcccaggttgttggcagacatcttgttttccataaatcgtgcagccaccctggggatggtgtgaagagaaaggtcagggtacaggatgcaagctcattggtctgagggtaagggtgggacacgcaggccagcctagaggtgacttgcccatgtcacaggtgtaagtcgtctgagaccagcagccacatatccagaactggaggtcaggggtcagtacccaaagttatgaatcatggattaaggttcagagttcagaaaacacaggtcaaaggtcagaggtcagtgtcaggggtcagccagggaagttagtagtcgcatgtccagggaaaagggtcgcgtttcaaggctcagggacccatgcacacctgaacagatgggccaccaggtgccgcagggtgttgtagttagagtcaggcagctgtaccaagagggtcttcagcgagcggataacctcagggctggggctgggggtcccagggtcgtccccagggtctgcatgcaaggtcttagccagagagatgaaggcgtcgtagaggtggaaggggatcacgggctcggtgagctgggggtggaacggagggcgcaacacgagtgtgggtgggctgtggagggctcctgcccgcgtccccctcagtgtcctgagcaccaacctcctgaagaaatcgcttgaggacactcgagacgtcatgaggcgagttccccgacagctccaccaacgctcggccattctcgaaagcctggcacagccgctccacacggacccgggacccgctgacccggtaaatgccctgcagggtgagggtgaaaaacagacacctggttcgtgataggccatcgattcggtcaggtcacttctggggatgatgaagggtcagggcagcacctgcacatccagggcacggtgttctatctcagccgtgcacttcgtgaccacaaagggtacctcctccgggaagtccctgggtagctgcaggaagtcaaccccaaaaaggggtgtccgggctgggagccgcctgtgtccacagaggatcaggagagtctccaggcagcgcttgtggcaggtcagaaagcactgtggggaaggtcacagggacagggaggtcattagggaccagtaggggaagagaaggttacaaggatcctcaaggaatgggggctcatgggagacatcaggttagggtgggtcccaggggcagaaaggctgtaggaatctcaggtcagggagatgatcaagggtcagcaaaggtcatttggtcattaacccaggccacacctcctcacactccgtcccgctgaccatgaaggcttcgcactcgcggcacttggctgggccccgcagtcgccgcagctggtgggtctgagccgcgctggacagtgtccacttcccgaaggggctgcccagcccattctccagcccgtctcccaggtctgcagggagacagggtcaggagtgcctggtgccctgccctgtcccatcctgacctaccctgcttcagcctcaccagggtctcgctcctcaaagtcatctgaggactcagtgcctgtggacgaagccttcaccagctgcctcgtgccagcgcctggggtcagaggaatcatgggagattcctgggctatgggaggcactcctggtttttagggcttccagaaccacccactaattcccaaggggtcagaggtcaggagggggattggacaggtcagtggttaagggttggagaattgggtcagcaacctgaggggggtggttcataagctggatcaagaggttgaggaaataggccgggcgcagtggctcacacctgtaatcccagcactttgggaagctgaggcaggaggatcacatgaggcaaggagtttgacaccagcctggccaacatggcaaaaccttgtctctactaaaaatacaaacattaaccaggcatggtggcaggcacctgtagtcccagctactcgggaggctgaggcacgagaatcgcttgaacctgggaggcggaggttgcagtgagccaagatcgtaccactgcgctccagcctgggcaacagagcaagactctgtctcaaaaaaaaaaaaaagaaagaaagaaaagaaaagaaaaggccgggcgtggtggcacacacctgtaatccctgcactttgggagaccgaggcaggtggatcacctgaggtcaggagttcgagatcagcctggccaacatggtgaaaccccgtctctactaaaaaatacaaaaatcagccggcgtggtagtgcacacctgtaatcccagctactccagaggctgagacaggagaatcgcttgaatctgggaggtggaggttgcagtgagccgagatcacgccactgcactccaggctgggcgacagaatgagactgtctcaaataaacaaacaaataaataaataaataatttttaaaaaggtaaaaaaagaggttgaggaaataggtcaggggtgtggggtaggtcagaggtcaaagatagttaaagattgagggtcagagcttggccaggggctggaggatggtcacaggtggagtgtgggtcaggaccaggtcctatccctacctgggctggaagtgggtgagtccagggaccgagactcgctgccgccacccacgctgtccacatcgctgcccggagtggggcctggagtccctaggtggcacaggtcaataaggatggtcccctgctcacaaaccccactcctgcagcccacctatgtgttggtggaacgaactcctggcaccactcccacctggccctcattgcactcaccttgccagcgccagcctgtgcccggatcctcccaagggcctggctcagctgaattctcatccagccttggaggaagaggcccagagagcttctttctgatgtccagaggggagctgagaagacagaagtttgaaggtttgaatcccaggaaactggcctggggtgatggcacccaggcatcatgtctaggtaccaactccaagcacttgggtctgcaaaccctgacacccagggcattgtggcccctgaaatacagtagccccacattcctgcccctgcccctaggactgggacaacccattcaccctcctatggcccccgagagcctggagtactaaattccactaaggctttgcgttctctaacctcgagtaaccagcctgcggtgccaacagcctggcatcgcgattccggggctcgttcccgactccctgctccagtgacccacctgttcaaggagggaaggaactcctggaaggagaaggcgggcggcgggggcggcggggcctcgggccgcagcgcccgtacaaactcctggtagcgctggcccggctcaaagggcgcacagcactcggccagggcggcgaaggcgcgggggccacgctctgcctgcgccccccgcagcccgaagagactcagcgtcacctgccgggtggagacagcaggttggggaggggcggagcctgggagcctgggggcagggccagagctggggcggggcttgagagacgcgaacgtggtcagggtttgggacgcacctgggcggcttaggaactagggcagtcggccaggggacccaggcatggtcagagcaggggctggtcatccaggggacaggacctcatggggcggagccgagacagtgggtctgggggcgggaactggctgtcgagggaaatggcctagtcctggtgtctccagggtggcttaggggcgaggagtggggcactcagtcggggccccaacggggtgaggggaggatggccttggggatgggcctcacccgcctcagcacttcatccccctgaaacaccagcttgcgcacgtgcgacacgattcgctgcttggcgatctccaggtcctgctgccgcgcgttggcctcgcggacacaggcctggtacagcgcctcggcctcctgcgcctggggaaacgggaggccaggagcggggtggggcgcgtgtgggcgagagtggagggcagggggcgccacagcgctacaggggctcggggccgggtgcccaccttggcctgggcctcctctcgcgagcgccgccgccgctcctgctgcttgctaggtcccggcgaggcctggggggccgagtcctcaggggacccctgggagcgtgcccgcaggtcctcgctgcgttgcacatactgcagctgggcgcgccgcagtgcctgcaccgcctcattctgggggatgatgagaaggtcagcgtcccggcctctctctcaccctacccttccaccaattccaagcctcaccatccgcttctgctccttcatccactgctccttgaactccttccgccacttctcaatctcagtccgtttggcggcgaggggctggcaagggttggggatggggatggagacgctgccttagggccaacccagaagcagccacccagtccttccattcctgcgccatgtgctttgccacctctggactctatttttttttttttcgagacggagttttgctcttgttgcccaggttggagtgcaagtgggcaatcatggctcactgcagcattgaacttgaactcttgagttcaagcaatcctccagcctcagcctctcagtagctaggactacaggcatgtgcactaggcctagttaatttaaaaaacaatttcttctttttttttttttttttggttggccaggtgtagtggctcatgcctttaatcccagcacttgggaggccaaagtgggcagatcacctgaggccaggagttcaagaccagcctgaccaacatggtgaaaccccgtctctacaaaaatacaaaaattataaagatgtgatggcacactcctatagtcccacctactcgggaggctgaggcaggagaatcacttgaacccgggaggcagaggttgcagtgagctgagatcatgccactgcactccagcctggatgataaagtgagactctgtctcaaaaaaaaaaataaataaataaattttttttggtagataaagacagggatctcactatgttgcccaggttagtctcgaactcctggcctcaagcaatcctccaccctcagcctcctagtagctagcactgcagacatgtgcaccaggcccagctaattaaaaaactttttttttttttttgtagagacagggggtctcactatgttgcccaggttggtctcaaactcctgggctcaagcaatcctccctccttggcccccagaagtgctgggattacaggcatgagccaccgtgccaggctggacccttttctgagtcagtattctcctcctggggtcttctccagacctgctctccccgacccctgagtccagaagtctcatgtagtcaccccatcctttctgcttggaagcagagacaccaaggctttcctcctgagaacactcagcacctcgttcccctccccacaaacaaaaacgaagtttttggctgggcgtggtggctcacgcctgtaatcccaccactttgggaagctgaggtaggtggattacctgaggtcaggagttggagaccagcctggccaacatggtgaaaccccatctgtactaaaaatacaaaaattagccgggcgtggtggcaggcgcctgtaatcccagctactcaggaggctgaggcaagtgaattgcttgaacccaagaagcggaggttgcagtgagctgagatcgcaccattgcaccccagcctgggcaaaagagcaagatattctgtctcaagaaaaaaagtaaagtgaagttttgcaattgcacaggaagcccagcttgaatctttgctgggtaaccttgggcaagttcccaagcatccccgggcctcagcttcctcatcaatgaaatggcgacgttggtagtggtgccttcctcccagcttgctgggaaacgaggggatcaggcctgaaggacagcaggatagcagggtgacctctgtaacattccaccctgcccccctcacctggtagtagtctcttttctgctgggccactgtctccatggccagggttcccaggctgagatcgtgctccagaaacagggtgtagatgtactgcagaggcatgtggctctggggaagacagagtggtgtaggaggatactgaagatctgtgggggacaaaggtggggttctagggggcttgggctctccgggggggtctggtcatgactacctgctgttgaatggacaccttgccagcttcagcgatcttcatggtgctcttagcaaactccagctctgggggaagagagagccgggctctgggtctagctggggtctggggactgcctggtaactggggctgggcggaagaggtcctcaccatagctggctctcttttcagtccaggcaagcagttccttggcatagcggctccaggtcttggcatattccagggctgcgtccacacccccctttgtccgaatgagccgcaagtccagttcctcccctggggaagatggatggacctctgacctttgcaccctagtctgctatggatgtcttccctaagcccccagaccagcccagtggcacctgtcctacagcctcacagctccccaaacactactttgggatcacttgtcctggttgcaattttacagattcactgttttttgttttttattttttattattttattatttatttatttatttttgagactgtgtttcgctcttgttgcccaggctagagtgcaatggcgcgattttggctcaccaaaacctctgcctcccgggttcaagcgattctcctgcctcagcctcctgagtagctgggattacaggcatgcgccaccatgcccggctaattttttgtatttttagtagagacgaggtttctctatgttggtcaggctggtctcgaactcccaatctcaggtgatctgcccgcctcggcctcccaaagtgctgggattacaggcatgagccaccgtgcccggcctgtgtttgatgggtttttttatttttatttttgaggcggagtctcgctctgtcgctcaggctggagtgcaatggccctattttgcctcactgcaagctccgcctcctgggttcccgccattctcctgcctcagcctcccgagtatctgggactacaggcactcgccactgcgcccggctaaatttttttgtatttttagtagagatggggtttcaccatgttagccaggatggtctcgatctcctgacctcgtggtccacccgcctcagcctccaaagtgctgggattacaggcgtgagccactgcgtccggccttgtgtttgatttttttggacatggtcttgctctgtcatccaggctggagtgcagtggcacaatcgtatctcactgcagcctcaaagtcctgggcttaatcagtcctccagcctcagcttccaaagtagctgggactacaggcacacaccaccacacccagctaattaaaaaaatattttttcttttggtagggatggtgtcttactgttgcccagcatggtcacgaattcctggcttcaagtgatcctcctacctcagcctccaccctgcctggggtctccctgagggctgggactgagatctgttgtgtgtactgccatattcccaaaacctaaacgatgccttgcatggaacaggggatcagtggtgatttgttgaaggaaagactcctgtctgtccccactgtcctggcctccagacccccctacctgtgaggggtacaggaccctctggggaggggccgctccaacagctggcttcgttggtctgtgcgggagggagacagtattcagaagcaaacagggcaggggcctggccttcctaaggccccctctgcttgaggtcttcctccctgttcccctactccccactcacaacagtggctgtaggggtcttgtcaggttctgggtcttctgagagtagagggtctccagccagcatctcaagggtcctgggggataaaggtgtgtcaggatgccaccttacacccagtctgtcctgccaaggggtgctggggaccttagggttgtttgtggcaaacatcacctctgtggcatctcttgtgtctgggaggtctgaagaatggtgttttgggggaatcaggtgagttttttttaaataggacttgaaaaagcatctgaagggccccagataactttgaggttcatagagtgggattatagggatcgcaaatattttaaggggttacaaggatatgtaggggttctaggaccactttggggatttccagtctatttagggggacacttttaggataccgaggcattttggagggtcccatcctagacttctctggttattaggtatgtaggtccagatgttacaggttccaaatgggactgcaaggcacctaaatggttaggggcttggggcatcttggcaggatttgggggtgatccaggctcagactcacacgttccccagtgagatttcgaggttgtccaggctccggaagatgtcactgtacctcttcctgccctcaggacctggggggagtcctaggggaggggagtgtaatacatgggctaaccactgcctccctccacccacggcacctcaaccagtctcatttggagggggtggaagagaaagggaagagtgagagagagaaagagagggctggggggggcttggttggggccaactcgaggcaggcagatggactcacacaccaccagagaccagagacagctgctcggggaacagagacacccactccctgggtctgcctgcacccagaagcaaaccaacaaaacagatgccccagatgcaaccaggctgtcccgagaagaaagccggtctgacaatggaaccacgggctagacagatggaaatacacaagggacagccaggcagagcctggggcagaaacacacatggagagactgaagccgtgagggacataaagaccgaatgacactccacatacacaacacagacacaaagacggccggaaacaccaagtcggaccccgccacatttctactgctgcccccctgccccctctcctaaggggcctagaccagcactgccgactccccagggctacagaggggccctgtggggatcctaccgcgttgccctctccctcagcagtcgtggcaccctgcccccatcacaaaaatcagaagcagaagcagtcacttccccttcctgggccccctcccccaggcgtctggggtgagggatcaaaagggggagggggagtgaagggctggggtcctgaacccatccgggcacagggctccccacaatggaggatccctgggtccttcccattcaggaactcctctcctggctctcaggacggagcgggacaagtgtgtgccctcaatgtaggaagcaggggatggtcgggggaggcccctcccggatccccgaccccctacccggctctgctgcgtccatatctgggcccggggatcgctctgcagggaccgggatggggatggggtcgcgcgccggcggggccgagccccgatttcctgccgccgcagccgccgccgccgcctcggttccgcgtcgccctgcccagcggaggccacgcccccgcatcagaccacgcccccgtagcccggaagccttgatagtgcccttctctacctgagccgcttgaaactgggtcgggccagggccccctgagcgaccactcgaggctgcagtgcccctgacctgggcatcctaagacttcatctgggccataggttccctctcagatctttgtgctaccccaaatcccacggagccccagccccctcctccctgaatggttgcagagtccacctgtcccggggggcctctcccaggagctcccacaacccgcgaccctggtgatccccttgcccaggttgtctctcggagccctgaaaccacctgggcctcgctggagccatggcgccccctggtggaggcctgatattctgtccgattccaaccaaaattctaatactcgggctggagaacccctggcctgggggacgccccttccgtgaccctcaaagctggatcaggctcaaggccccaattacagcacaccagggagcagcccttttaggtagggagtggaggtttgtccaaaagcaccagctctggggttgccacaagccgcctgttataaaaatgctcccacccccagcacagtggaattttggggctggaaatagactttaaagtatgtttataactttgtgtccaaaggctttggctgttaaggaggcaaggattctctgactggctccgtgctgcctactctgcagttcttgagttgtgatgagtgagtccattgaaaggaataacactatcaacctaagagccaagccaggtttccaggtcacatcctggctgatgctcagccagagctccctgactgtgacatgagatggtagagcagcgcaggcccccaaagagcatgacagagtcagtacttgtttgtttttcttttgagttggagtctcgctctgttgcccaggctggagtgcagtggcgttatctcggctcactgcaagctccacctcctgggttcacgccattctcctgcctcagcctcccgagtaactgggactacaggcactcgccaccatgcctggctaattttttgtatttttagtagagatggggtttcactgtgttagccaggatggtctcgatctcctgaccttgtgatgggcccgccttggcctcccaaagtgctgggattacaggcttgagccaccggacagagtcaatacttgtaatgatgcagatcatattcctcaagtctcagacaccacccgagagaaaggcatgctgttatgtattatgggaaagaaaaaaatatcacacatcctaaggcttctctcagcacctgagttgttaaaatgtgaaagagacctcagaaatatgggggtgcttgttaaactagaaaatatgcactgaattctctgggcagggacaagtccatgttcaagtgctgaaagtgccagagggtttcaccaacatcacacgcctgtggggagggtgctgggaccttcctcagtgaccctctgtccccgagcccccagcaaacaccgtgtggcacagacgaggtggaggcagggctttttaaaatctcagatgctgctttatttaccaaaggtgctggcttggggctggttctgctggccaagccagcggatggctgtgggggtcccagctcagtcttccaagggcgagactgtacagccttgctgtggggggttgggggcagggttccctcccggggccctgttggggttcccgcccagcggcagccagggtgggcagtgggtaccagcactgccatctcaggaaggcactttcagcttcggggtccccaggaagaactgcaggacgcggtcggccaggagcgccaggcagaagtccaggagcaggacctgggcaatgaccagcttgaactgtcggggcagggagggatggtgagctggagacctgcagcccagctcagggtcactgccataggagggacccatcaagctgagccccagggtcacctccacagggccactgacctccacagggatgtccacgaggccaaactggctgttgaagtcgggcgaggagccgaggagcaggccaatgatggccaggagtgaaactgccagactccacaccaggggcttgttctcgggcaggctctccatgaagggcgggccctgtggggatgagggacagatggcttcatggggtggggctgggtgggcagacagtgaatgtttgggcagggcccaggccttactttgtaattgatggcgaaggtggccatctgcatggccatggccatgatgtagacggtgctgttgaccaggcttggctcaaactccttgtacaagtccacgaactgctcctgcctgcaaggacacatgggagtcagggccccctctcctgctccggctcacacacactgtgtggcttcctgctgccctggcacagagctagggctctgcctggcctagtgcccctccctggacaccctggacaacccccagcctctcctgctgaagtctgtggagtcatcctcctgctattctcagctgcagggacatcacctcctccaaggcagcacttacttctcggggctccgggcctgggcctcacggtacaggtagacaaggctcaggaagtgcacaaagaactggagcatgacggtgaggatggtgtacaggttgaagatgttgggcaggggccgttctcgggagagggtcttgaggggctgcagcagcaaggcgggtgggggagtcaggatctggctcacttggggccaccctgcccacacagcaggcagtaacatcccctgcctcccgggagaccttgtgtacagccaccaccaaatcctgggggattccatgggtcagcaccagtccctggatccctgcctgcctctcacccctgagcccagggctgcctccctggccccggctccgccatccaggctccccatggcagccacaggggcctgagaatcatgaagcagatcctgccctccctggagcccacgggacaggcacagtcccgcccagccaatctcccaccccctccagccaccggggactccctgcgtcagcccatgcctgtttggggcctttgtgtccagttcctggccgctggcccccctggttctttacgccttggcctgagtgtcggtgtcgcacaggcctccccagctgtccaccagcctgtcctgtgtagcctatgacccacttagttgtttttttaccctcttgatgattgttccttgcttgtggggctctgtggggcccacccctgggacccctacctgtggacaggtgtggacgccaagctgtaccacctggaggggtctgggagcctcagtccacacctgccctgccagcatttcctgagccatcccagctacagcccccatctctggggccctgggtcctgtaacttggggatgacaattcccgtgcctatatcagcctggccctggcaggcccatgcatccctggccttccagcacctctggggcccaccttggaacgggagatgaagaggaagcagccggccagcagcagcccctgtagggtggcctggaagtcactgaacttgactccctccaggtagaggacgctctggctgtaggccaggatgagggcattgagcgccaggatcttgaacatctgtagcgtggtcaccagcgtgcagcggccctgcttgatcacgtggcagactgcagggtggtggggaggcaggtgtgggtgtgggtaggggtgccaaggggggaatgaagggagggggagcgggggcaggcaactcactgcactggatggatgagagcttggaggtgaagggtgctgcgatgctggcatcccccagtttcacaatgggcgtactctcgtcctcgaggtctcgcagcacctggctcaggcggtcctgcagggtagacagcaggctgtcagccctggccaggatggggtgcagcacctcccctcttgggactcaccctctgggaggttggctgctcctcggagggagggagccccgaccgctgcttggctgtcctggaggtggctctgatgccactgttgctcagggttgggctgtcccggggccgccgtcgccgctcgacaacccgctcaggggcattggccaagagcgccacacctggggggcaggagggtgtcagacccggaggagcaggctccacggaggggaagattgctggcttcagagccactggtcctgaagtcccccagctggctcccgtgaggacagttcccagacttccccatttcacctgacaccctaaggagacctcagagagtgcccgtgttgctttctacaaactactttaagaaaacaaaccaccaacaataaacccccacaacaaatgcaatgaaaaaacacacaacacgagataggtcaaaactaaactgattttggccgagcgcagtggctcacacctgttatctcagcactttggaaggctgaggtgggcggatcacctgaggtcaggagtttgagaccagcctggctgatacggcgaaaccccgtctctactaaaaatacaaaaattagccaggggtggtggcatgtgcctgtaattccagctactcgggaggctgaggcaggagaatcgcttgaacccgggaggcggaggttgcagtgagatgagatcacaccaccgcactccagcctgggcgacagagcgagacagtctcaaaataaaacaaaacaaaacaacctaaactgatttcaaaagaaatagccaaggagcatgattctaggaggcaaacaacactcaataaatgctttagtagataaaagcagataaatattggaaaagcaaaaaaaccaacgtaagattgatctttaaaattcaatttaacacctgagttcttgcaaaaaaaaaaaaagaaaaaagaaaaaaaggccaggtgaggtggctcacacctgtaatcccagcactttgggaggccaacacaggcgcatcatctgaagtcaggagttggagaccagcctggccaacatggtgaaaccccatctctactaaaaatacaaaaattagatgggcatggtggctggcgcctgtaatcctagctacttgggaggctgaagaaggagaattgcttgaacccgggaagtagaggttgcagtgagctgagaccgtgctattgcactccagcctgggcaacaagagagaaactgtctcaaaaaaaaaaaaaaaaaaaaaaggcagggttcggtgggatgcagtggttcacacctgtaatcctagcactttgggaggccaaggcgggtggatcacttgaggtcaggaattggagaccatcctggccaacatggtgaaaccccatctctactaaaaatacaaaaattagccaggcatggtggcacgtgcctgtaatcccagctatttgggaggctgaggcaggagaatcgcttgaacccgggagatggaggttgcagtgagcccagatcgtgccattgtactccagcctgggtgacagagcaaggctccgtcaaaaaaaaaaaagacagggtcttgcactgtcacttaggttagagtggatcacaccactgccttgaactcccagactcaagtgatcctcccgcctcagcctcccaaagcactgggattccaggcaggagccacagtgctcagccatctgtgtgcttttgacagagatctggggctatgaaccatcttcatggcttcagctctgggttttctgagtcactctcccaacttgttgcctctctcctggcctctggcctccgccctgctctgttcctgggatattcgcatcccttcctgccctcaaagcccctgaccttgccaccccctcccatcctcacaggaattagtgcccccgtggctgtcaccaagggccaggtctgtctttctagctcagtgacatgtcctcaacacctcgtccacaaacgaaataccctagcccacagcactcacccacgtcagcatgcttcagggcgcccacgtcgttggtgccatccccacacatgagggtcacgtagcccagctccttcaggctggtgatgacaaactcctgtatgggcggagacaggctgagcaggggctgcgtgcctaccgctgtgcccctgacccctagggctgtgcacataccttctgcttgggagccacacgggcgaacacctgcacatgggggatgaggcggagcagctgctgggggtcggtggcctgcaggtgggccaagccgtcgcctgtgaggcacagtgcgtactccagggccagtgcctttggggagccccgggccaggggcagcacgatgctgccgtcaatggagcgccactcgcactgccggcctgcgggcagcacctagggttagggctgggggcttggctgaccgggctcagaagcaccctccctccactcggaccccagcaccagccagtctctcctctctggagcccgcacctccctacccacccaggtgacccccagcccttctctggggactccacaaagaatgtccctcaggtgcacagggtggaaccaagagcctggggcctgagctacttgcctgagagcccgggacacagccagattagaacctgggcagtctgaccccagctaagccatgcccccacctcatgcaaggccccctaacctgaaacacacagaagggggctattgcgctctccttgggaaaccccacaccaggccctcacctcatttatccctgcgcccgtggcctctctgaaatcctgttttctcggggctgggccccctcccaactctgacagggcccctgagttctcaacatcttcttgctccacttcccctttcttgctggctggccctggcttggatgctgggcgctgaggatggccaagggcggcccgccagccctcctggcactgcctgctcaccctggaccatctcaagctgaagggcagcacacttccacctggcttgtgctgcagctgttgctagaccagcttcgcttgtcaatcaacagttctgctcatccgctccatgccacctgcccacaatccccaggccctggaagaccccggtagctggggctgggacagggggaggcctgcgaccaatagaacagagggagggcagggaccgagtcctctgagaggtggcctggaggttccggaagctgctctggcccagacctgtgaatgtttgctgccagcagccctgtggcaacactgctccatgtggttcttcttagggccctgtcaacactcatgcaggtcctgaactgcgtgcgcccacaggggcttcacctctagctctggggcaggtatctggtaagccccacacctctagctgggaggggctgggtctctatgtctgcctcttcatcaatctgaatccagggcattgctcaaagaggtcactggggagaggttggagccttgagctctggaatcaggctgtctggattccaatccttagccatggattggaagtgacctgggcaagtgggttcacttctgagcctctgtcccttctctacaaagcagggccccgagagctgacccagccagcttcctcctctgtggtgtggggaaggcaagccaccccgtgtggtgcaggatggggtggagggaccaacgcagtaacacgcacggagcgctccgcctggggtctggtcaggctgagcactgggcaaactgccatcaactgtggctgaggatgccagcagtccctgtgctcgggaagggagcactcggtacatgggcagcttgccgggccaaagagggtgtgaaatgaggatgacactgaggatggggagtaagcgtggtaggagcagtatctgcccatgagtgcacaggaaacccgagctggcagtcagactatcgcctcattatggtaaataaacacctacatgccgcacatcctgggacctgcgacccagtgaacgctcacatgctgtccgaggtgcccagtgggccagggctgtgattagtggtgccaggcatttgaagacactgtgctgctgaggcctggtacacaggtgggctgttgcgatgggagctgttcttggactcagggtcccccttccccactgtgggccaggctagggcctcacctttctcggagggaggctgcaggatcagcgtgtgggccttttcaatgaagtgcagctcctgggccacgtggcatgcagtgagcgggttgtctcccgtgatcatgaccaccttgggtaaagaggggcagaggctcagcatggcaccctggggccaagctctaggccagagacaaggctgccaagtctccttctaaggtaggccacagtgggagatcctgggcctctaaccgagatgctgaatgggcttccaagggccacaacccacccccacccaggtcattttacacaaatgacacgtgtatgtgcgtccttctgaagacacccttagcttggatttgcaatacaaatgaacaacctgcccctgaggtggacccttttggcttggtagctgcccatgggggtaatatttcagcaaagaggaggatgggaccatgacctctgggcttggtggggactaatcacatcacccatgtgacccagagccatcatcctctgagacggctcactcaccccttacaccctaaaagacaccctaagtcccaaaatagaaaacacaagccaccagaagccaccaggacaggcagacagtgccccccacccaactccccagcctcagcttccttctctccaggacggcggtggaacggggaagtggagagaagtgcccccatcttcccatgatgcggggagtgaagggagtggtctgtggaggagagaggagccagcacaggcgggtcccagagtgtccttgggccagtggcaatgttagcacctgagctatgatcttgctcagctaaaacatgcagcctgtgagacttgggtgcccacccctaccacgaagctgtaattgtcatctcctcgcctctatttcccatgcagagggtggagccgagcaccgtcccatacccggtgggacgcattctggatctcccggatcacggccttggagtcagccttgagcgggcaggagaccacaatgaagccgacgaacttgaggctgcactccagggcctcccgcttgacctcccgggcctgcggacagacaggggcaccctcaccatctgtccctccctctgcccacactctgcatttcctgagctctgaccatgcgctgggagccaaggggacaatggaaggccctgttcccgtagtgggcacatgcgagggttgggaggggagaaatgccaggagggtaccaggcacgcttgaggggtgggatctggcagtgactggggggtctgggtcccccgaatgtggctctatgtcctgcttgcggacatgggcacatcacagagtcccttgtggctcagcttccaagtcaatgaagtagggactctcccaataatgttggagtttagccaggaactcttactcactggggctccaccacataccacagactgggcacagacccctggccttagggagctcacactgcaccaggggagacgcatgatcaagaaagtcacagaaatcggagtgctgagtgccatgagagaggaggtgagaatggaatccagagagggtggaaaggcctcagaagtggccactatgaaggcgatgaggacctgtgtcactgggaagggggctccaggtgcaggaacggggcagagcatgcaggctgtgagctgtggcctgggctctgcacacagtactgcaacctgaggctaaattctggaaggatccgcagctgtagggtgcaagcagaaagaacgagagcccaggaagaagccaagcggcagatgtgccggtggtggaggcggagggtgggctttgtggaggatggatgggtgagagggctgaggatgccacctagccctgcccaagaccagggcaaaagagtagagctagggacacaccaggactggggcaggtaagccctgcgtgtgctctgcgtgagccaggactgggtgggtccccacagcagtggacagactgagtgccatttggagtctccaaaggtagaagctggaggcggggcaaggaggacaaaatcacaaccattcaacctggcactgtgggacacaggaggtgactcagggaggagctgacgggccaggcacatggtgaaggcagggggagcctgggcccgtacctgctggtgagtgaggtgtcccagctccttgtaccccagcgccaggacgcgggctccttcccgggagatctcggtgtggatgtggtggtagtcgggcgggcactgggagaactgcagggaatgcagggggatgtcacgggctgccccgcgcccccaccccttgccccaggctggggccagctcaccatggagtgcagagtttcgggggcccccttcacggccgcgatgtagcagaggtcggtggagcccagcttctcatacgaggcaagcacggacattcgcttcagggcactggcaaaatgaaagcgctggtgaattttcagcccctgagttttaatacttcgggggaatactttctcatctggaaacaaataagtacgagtcctgaggggctttgctccaaagaggcagccaagcccctacctctcaccccggcctcccccacctccctcctgcctcccccagggcctgatcggggctctgggctagagcaggtgttggtccagagctggaagacctgggcttggaggaccctggcactgtggcttcggccagggcagggcagattccaacccagagggacacccaaggacgtggcctatcctgggtctaaagtgagcctctggccacccacctcggggagcatcagagctgtaggcctgcctgtccccaagatgctctgaggggtgcagcccacctgcctagggctgtgagagccagtggctcccccttgctgggcctgaggccccagcccctcacctttggtcagcgtccagtccacggccgtcagcatggccttctctagagggtcacccacgagggtgccgtcgtccagctgcatgagcgagtggcacgaggccagggcccggtgtgtttctacagggatgctggacactggggtcacctccttcccgtctctgcaaggtcggggaacagctggttacagagtgcaggcgggtagggcgaagctgcatccccaccagcagaaggacccccaaggccattcattccgtgcttgtcactggggtggcttgggcgccaactgggtctttatgagacctgcacctgcttcacagatgcccccagaagccaggcattgtgcctgggggtcatgtggtgcatggctggtgtgggatgttccaggcctgagctgagcccccgtgccgctaccatggctgacacccaggactttgtggggagcccctggaaatgaacccgaggcagggcctctgacgggccctcactgcaagggcttggggtggatgggccacctgtctctcgacttcccagaaaccccatctgggtgacctttgctgcagggcccctgatgcttacctcagcccggccacaccgcgcaccaccaggctgtcactggtcaacgtccccgtcttgtcaaagcagcacacctcgaccttgccagcaaaggggatccggaagggctctgtgcagtacatgtctaggggcgggagtgaggtcaggggtcctgcttggccccagcccactcggcaccccatcccatttgacacactcacagagcttggccagggcgatgagggaggtgttgacggccagggacagctcgatgggcagctcaggaggcacgaccgaggtgaggatcagggtgcactccagaaacagcttgtagcggttccggctggggtccttggtacctgtggagacagggcctgccaacctggagcctcggagggtgggcgcaggggaccacagaggccgtggcgcttaccttcaatccatacataggcagctgcagcgatggcaaacaccaggaggaagaggatgaagatgaaggtctccaggttgttcgcagtcaccctcttgaccccgaagaggatggtgcgcagcagcttgccctggaggaatggaggaacagcctttctgctgtctggactccctccagcagctcaggcctggaagcgtgggcctggtcttggggtggcctctgcaccctggcccaggtccagggccgtgctgccagagtcagcccgtggggcagatgttctggggtcggaaagggctgataccttggctgtccaactgccctggggcccgccctccccagacctggccccgcacctgggatgtgttgaatccggtccgcaggacgtaggccacgcacccgctgtcaaccgctggggagagaagcagagtcaccgtcatgcctgtctcctcgtcctgactccctcatgatcaagcagacgggcaaagggggtggaagcccagatacccccagacgcccatgaggcacctacgcttcaggcccgtggtggctttctgtggggggatgtgctgcaccaccttggtgcccccgaagatgacgtgcagccgggaatcagcctggaggtccagcacccggtctgggctgaggtcttcgatgggctcctggggaggaagatcgtgaatctggatggccaggcctaccttgcttccttctccatctgagttcctggacagctggaccttgaggctggaatgagccagggggatccccacccgaccaatacatcccacccagctcccagatcctcaccctcaccccgtcctgtcttctccccattgcactcacagtgcctgctctctggggcctgcacttggcctcgtctgggactcacccctctggactgctcccagcccaccttggtctgacatcccagggcaccaatgtaccctggatgcccttggctctctcacctccttcctcgcccccaccacccggctccccagtccacagagctcatctgtgcccacactgcctcctccgcctgtgcctgagggggatccccgccaccccctgggcctccacctcctggcctgtttcctcctgaacagcttgaggatccccatcctccaccaagtaccttcatctgtggcacggactcccccgtgagcatggcctcgtctacgatgcagcggcctcgcagcagaagcacgtcacatggcaccaggttctcctgtggggagcggcctgcagggcagaggcaggagggttggccagaggccctgaggctggggctcccactgggactgagcggaacccggcctcaccgatggagacgatgtcccctggtacgatctcatcactggcaatgggcctccacttgcggcttcggtagacctgggcggggcatgggtgtcagcacagaagccgcacctgtgctgcacccccaacctgggtctccctggcagccacacctggatcatgtggggcttgttgcccatcttccggatctccgacatgttccgcatctgctgctgcaccagcgaggcctcgaacgccaccagcatggatagcgtaaagacgctgtagtaccagtactcatccaggcaccagagccccacacagaacacctgtgggataccagcctgtctgtccttgccctacccgccctgttcccatgagccccttccacccaccggatctgatatgtgagggtggggagaggcttccaggtttagaagtggtgggcaggcttgatccggttaggaaagccccaagggaggaaatggggagatgggccagagctgctgctttacctgaaatacaaagaagggggctgtggctctctccttgaaaagctccgagaagtcaggcaccaccatctcggccctgcaagagaccaggccccatcctgttcccagggcaaggcctctggggtatggagtctccaccctgacccctccaacctgagcatggcaggccgctctcaagaaaccaagagccatatgtgggcgtcgggagccctggcgagcttccagataggaggatccatttggcagtggctctccctcatcctggctgagcctggggtagacatgctgcccgcccacagccctcggctctgcataaaacagatgaagctccttaatctgcaatatgctcttcctggcagcctggggctggtgtcagacgagagcccgtcatctggtcgagtgacacagcaagtagagaaggaacctctgattgaaagatggaggccctgaagctacagacagcagaagacactgagacccagccccaccaaagctgagattttctatgattcctgaattaaagccccagaatgggtcgagtagggtggttcacgcctgtaatcccaagcactttgggaggccgaggcaggaggagtgcttgagcccaggagtcagagactagcctgggcaacacagcaagaccttctatttacaaaaaatttaaaaattagctgggggtggtggtgtgtgcctgtggtcccagctatttgggaggctgaggcaggatgaatgcttgagcccaggagttcaaggctacagtgagccatgatcacaccactgcactccagcctgggtaacagagtaagaccctgtctccaaaaaaaaaaaaaaaaaaaaaaaaggctcgagaatgcaaggacttgggcctaagggtgtgttctgcagtactctgtgccatagtccaatctgatcagggcaccagtcatgtcaacgagggtcattctcgctctgccctttaactgcatggacgtcttatgtatgggatgtgagaagaggaaaccaaagagcaaccccactgctatcaaacaataagcccttcccttgtatcttgctgggtacctttgcgttgagtaagaacagcatgaaagggaacgtagttgccacaggccattaatgtgactggccaaccttggggtaggggaagttgctaaatgtttcttataaatccttgtattagattgatagttgtagtcaacatatttgtaatctctgaacagtgattaagtcaggaaagagctccctaggtgttctgtgggtttctgggttgaggaccatcgtaacaaggccatgatggggtttggagcccagttctccggctcccagccacgtgtcagcatttgcagttttggtgaagatgaagggagagggtgtgcaccgcacattggccattgtactcagtacaaaagggcagacatggtcacggtcttccatcaccattctgaagcgctgagatgcgtagactcgaaacagtgaggactgaaatgtttaggttgggtgcagtgactcatgcctgtaatcccagcactttgggatgttgatttaggaggactgcttgaggccaggagtttgagacaagcctgggcaacacggcgagaccccatctctacacaaataaacattttaaaagaatttaaaataaagctgttgctgaggaggggccacaggctagactcctgtgaagaaccttacactcaaggtctcacaccccagggcacgggcttccagctgcagaccctctggggttcctgccagcaggcaagttcaggggagactggacttagagcatgttgctcaagcggcatcacagtcacctgggacatttggctaaaagggcagatttggccgggtgcagtggctcacgcctgtaatcccagcactttgggaggccaacatgggaggatcacctgaggtcaggagttcaagaccagcctggccaacatggtgaaacccccatctctactaaaaatacaaaaattagccaggcgtggtggggggagcctgtattcccagctgcttggcaggttgaggcaggagaatcacttgaaccggggaggcggaggttggggtgagctgagatcgcgtcactgcactccagcctgggtgacagagcgagactcagtctcaaaaataaaaaataaaataaaaataaaataatagtaaataaataaataaaagggcagatgcctctgtcccgcttcctaggcaccctgaatcaggaggggagcaggacagaaaggcaaaggtgctacaggcaaatcaaggactcacttgttgctcccaaatttcttctcagctgctcggatctctgagtcttcctggaagcctctgttgctctgatagtatgagaaggcgtttcccacaggaaaggccacggggagaaactgcttcttctccagggcatcgtaggaatacttgatcttctggaattcgaaggacagcacctcaagcccgtcttcgccctgcggtagaaggtgtgtttgccacagaggcccctgaccttggggtgtcagcgcctgggaatcctactcaagcccctcctccaggagcccagcaggcagtccctacctcattgcggtgcagggccacgagctccgtggagccattgttgggggttggcaccaccttcacaaaggtcgctttgctggggtcgtactcctgacagagacaaagaaagcattgtggcttagctcttctcaacctacagttccaagacccccccgggaggttttgggtgcagcagctctatgggtatattctgaaatgccactgggctctggtgctgcctctgtcactccctcgtctgtcatcaggacaaacgagaccatcttgctgtgcctctggtgccacacttaaagctgggagcacaaggctgggcacggtgactcacacccataatcccagcactttgggaggccaaggtgggcggatcacttgagatcaggagtttgagatcagcctcgccaatgtggcgaaaccctgtctcaactaaaaatacacaaatgagccggacacggtggtgcacacctgtaataccagctacttaggaggctgaggcaggagaatcccttgaactgggaggcggaggttgcagtgaactgagattgcaacactgcactccagcctgggtggcagagtgagatcctatctcaattaaaaaaaaaaaaacaaaaaaccagccaggcacagtggctcgcacctgtaatcccagcactttgggaggccgaggtgggcagatcacgacgtcaggagattgagaccatcctggctaacacggtgaaaccccatctctactaaaaacacaaaaaattagctgggcgtggtggcaggcatctgtagtcccagctacttgggaggctgaggcaggagaatggcgtgcacccaggaggcagagcttgcagtgagccgagattgcaccactgcactccagcctgggcgacagagcaggactctgtctcaaaataaaaaggctgggtgcagtggctcacacctgtaatcccagcactttgggaggctgaggcaggggggatcacgaggtcaggagtttgagaccagcctggccaatatggtgaaaccccgtctctactaaaaatataaaaattagctgggcatagtggcaggcacctgtagtctcagctactcgggaggctgaggcagaacaatcacttgaacctgggaggcggaggttgcagtgagccgagattgtgccactgcactccagcctgggcaacagagccagactccatctcaaaaacaaacaaacaaacaaacaaaaaaaccccaaaaaacaaaacaaaaacaaaaacaacaacaaaaaaagctgggaagctgggtgcacagacagcacctaatgcccagggctctgctctgctgaaggtgacatgaactcaaataggaagaacgctgccaggcacccacccagtacgtcctcaattcacgtgagccaagcccccgccccatcacaggcccccggcctcctgctcagctctgcctcttccaccaaccctgctcactacactccacagctccacacgcacatggggctcgatcgtgcctcagcaaagggccttggcatgtgctgttttctctgcccggaatacacagtcacacagctcccttgctgcctcaggcttttgctgaaacatcaccttctcaggagcccctccctggctgccccatctaaagttcccggcaatgtcccatcctgtcctgatgttagatgtcatctctgtttggcatcaactgctgactatgagttctccctcccagtaacaccacaaaggcagggggatttgcctgttttgttcactgctgtttccccagcacctaagacacagaaatgttgaatggaactcgttcagtgctccctggaccccgtgaaccgccatccattcctctgctgctctgctagaccgagctgcatggagacgagctgcatggagatggggggagcacaatgatgacccgcagaaacaaagcgccaccgcacgggtggttcatgggcctccaaagcaggcagcaaataacaacaatcacataactacaaacgtgacgtcacggaagaaaggtacaagaggctatacgctgtgatggccccagggcgggcactctgcagatatcatctccgcttctcaagatggcacccagtagttgttagttacggttctcagtttacagaagggggaaactgaaactcagagagcagaagcggccctttctgagatctgaatcaaacccagatccacctctcctggctgatggctgttcagctcctcccacttctccatccctggagaggaagttaagagctaagctgcttagctgcaggtcaaaaggcagctgaagtttgagcggtgccacagtccccttaacccctcctttattttgtccctcattggtgtctttcattgtactacctcaaagctaccacgttgagctcctcccctgggatagataagtctttttgaaggacagaacaggttgtctctcaggagaggagaatgaggattctacccacattcagagccagccagggtggggggcttctgtctttctgtagcccttgatgctgttcccttttcctcttcttgaggcaaacacactcctggaatcagaggggaagcttcctgatatacctcagtgtccatggctccaaacctgctggtgtcacctgaggcaggcccagagagagacgacacagtcactgcttcaggcccagggaagctcacagtcaccaactcctccgacgacacttggtcactcagaactctaaactgtgggtcaggagcgcgaccttgcttgctgttgtatccccgacagaactcagtatcaccaccctcattttgcggaaagacatcatgtaaatgactcgctcataaacacctctgcctctcttcaacactgtaattaactgcatttcatgctcctttccatcacagtatggaagaccactaagcactggacagcaagacttggttcagtctaagaaccaactaagcttcatagatgggggaaacctatcccagtgatctcgccttacactttgaaaaccaaggtaggagacagatgagatggaaggtagggccgtttccagaacaagagtagtcgctaatatgggaactagtataaacaactcctacctgacctgggcgacgtatgctgggccctgcgctaagccttttacaagtattacatcactgaatctaaatgaccataacagggaggacttcagaaaaaggaaataacccgcaccaggcatgcacagcaagtcagcagtggggtcatgattaagcctgcgccaaagtgtagagggtgcccctgggaatccaggccaggcagatgagtggcccaggtcgcgatggtgaccgacaggaaggccgcagctgggacccacggcgaggctcgaccgtgctgggggtcgggctcgcgtgtacacacttaccggggtgcaggtgagcgcgcaatgcgcgtgcacagaccaatgccccgagaggacagtgagcgcgtgcgcgaggcagatggtggcaagcacgagcagcgcagcttcggggatctgcacccaactgctgccccagccccagcagccagcggctgcggcacccaaccaggccgggtaaagcagcccggcgaatggcagcaccgtgaggcgccgcaacagcgccaaccgccggtacggccacacggcagccaccagctcgtcaccgttcgctatgagcgccggcccggcggcaaggagcgcgcgcggctgcggcccgggcttgggctgcccgtcaggccggaccccgcaaggccgggccccgcagggcaccgcgttgcccaccgccgccgctgccgccatctttcctagcgccgcgctcacttccgggcagaggaacgcctcacttccgaagttttacttccggtaagccctgagcgccgccatggcagcctggactaggaagagccagggcaacagaacaggctggccccggcagggactacttcgggtgccgccatgacaggctgtggccggaagaagaggctgggcgtcgccatgacagagagggactggaagacctaacggtgcctgcctccgctgccacgccggactgagaccggaaaagacaaggccggcaaggcgggcttgggcgccaccatgacaacctgaaccaaaaaaagcgagccctcctccttgactacaccagcaccacctgtcaccaggggcgaagcctggaccctgcggaggcggggtcgggagcttcggagttcaggaggcggggcccggtgcggggggcggggcttgtgaggggcggggtcggggaccgccccggaacacaaccacaccggacaagagccttaatgtgatagataagaattacaaatactagccgggcgcggtggctcacgcctgtaatcccaacactttgggaggcgaggcgggtggatcacctgagatcaggagttcaagacccaacatggtgaaaccacgtctctactaaaaatacaaaaattagccgggcgtggtggcacatgcctgtaatcccagctactcgggaggatgaggcaggagaattgcttgagcccgggagacggaggttgcagtgagccaagattgctccactgcacttcagcctggccaacagagcaagactgtctcaaaaaaaaaaaaaagaaaaatgaattacaaaaaccactttaggccgggcgcggtggctcacgcctgtaatcccagcactttgggaggccgaggtcaggagatcgagaccatcctggctaacgcggtgaaaccccgtctccactaaaaatacaaaaaaaaaaaaaaaattctccgggcgtggtggcgggcgcctgtagtcccagctactccggagcctgaggcagaatggcgcgaactggagaggcagagcttgcagtgagcggagattgtgccactgccctccagcctgggcgacagagcgagactctgtctccaaaaaaaaaaaaaaaaaaaaaaagaaattaccactttaacataaaaaatgaaaaactggtgtttacttgaaattatatacttctaggccgggcgcggtggctcacccctgtaattccagcactttgggaggccgaggcgggcggatcacgagttcaggagatcgagaccgtcctggctaacacagtgaaaccccgtctctactaaaaatacaaaaaattagccgggcgtggttgcaggcgcctgtagtcccagctactcgggaggctgaggcaggagaatggcctgaacctgggaggcggagcttgcagtgagccgagatcgcgccactgcactccagcctgggcgacagagcgagactctgtctgaaaaaaaaaaaaaaaagaaattatatagttctatattattaactgtactgttgcataaatgctatttgaacaaaaccacaataggactacttaacagtaccaattagtaggattaaacagtatgtgtgacaaacagtaactattttatgtttctttttgtcctctgatacagcaaatttatttaaacttaaaatttattggatatttaaattttgtagcttatattgttgcatattctttttttaatttttcgagatgaagtctcactctgtcgcccaggctggagtgcagtggcgcgatgtccgctcactgcaaactccactttccgagttcaatcgattctcccatttcagcctcccaagtaactgggattacaggcgcatgccaccgctccggctaatttttgtacttttttttttagacggagtctcactctgttgcccaggctggagtgcggtggtgcgatctcagctcactgcaacctacgcctcctgggttccagcggttctcctgcctcagcctcccgggtagctgggactacaggcgcgtgccaccatgcctggctaattttttgtattttcagtagagatggggtttcactatgttggccaggttggtctcgaactcctgaccttgtgatccgcccactttggtctcccaaagtgctaggattacaggtgtgagccagcgctcccagtctaatgttttgtgtttttagtagagacgggtttcgccatgttggccagtctggtctcaaactcatggcctctaatgatctggccgcctcagtctcccaaagtgctaggattacaggtgtgagccacggtgcccagtcctagtcttgttttgttttcttgggacggagtctcactcttgcccaagctggagtgcagtgttgcaatctaggctcactgcaacctctgcctcttgggttcaaatgattctcctgcctcagcctccttagtagctggaattacaggcatgaaccaccatgcctgctaatttttgtatttttaggagagacagggtttcaccatgttggccaggctggtctggaactcctgtcctggcctcaagagatctgcctgcctcgacttcccaaagtgctacaggtgtgacccgctgcggccacccactgcatattctggtttttttttttttttttttttttgagacggagtctcactctgttgtcaggctggaggctggagtgcagtggcgtgatctcagctcactgcaacctctgccctcggagttcaagcgattctcctgcctcagcctcccgagtagctgggattacaggcgcctgccactgcacccagctaattttttgtatttttagtagagacggggtttcaccttcttggccaggctgagtcttgaactcctgacctcgtaatccacccgcctcggactcccaaagtgctgggattacaggcgtgagccaccgggcccggctctggtttttttttttttttttttttttttttttttttttttttttttgagatggagtcatgctctgtcgcccaggcgcaatgctgtgatctcggctcactgcaacctcctcctcctgggttcaagcagttctcctgcctcagccttcttagtagctaggattacaggcatgcgccaccacacctggctaatttttgtaattttagtagagacggtgtttcaccatgttgggcaggctggtctcctactcctgacctcatgatccgcctgcctgggcctcccagagtgctgggattacaggctgagccaccgtgcccggctgcatattattaagatacatgacttcgtaaaaggagaaaggaaatgtaataggacttaataatcacatagtatcaaataagataatcttcagtaaaaataggaatgacatgtttctgtcccatgatacagttcgatatacttactttttcagttttttctccaatattaattctttcccatacaaggtccaagcttctgctcttggagtctgggactggacccctttctggtagcaatacctttatagaatgtttactccaggccgggcacggtggctcatgcctgtaatcccagcactttgggaggccaaggcgggcagatcacgagttcaggagatcgagaccatcctggctaacacggtgaaaccccgtctctactaaaaatacaaaaaaaaaaaaaaaaaaaaaaaattggccgggcatggtggcacatgcctgtagttccagctactcggactcgggaggctgaggcaagagaatctcttgaacctgggaggcagaggttgcaatgagctgagatcgtgccactgcactccagcctgggcgacagagccagactccgtctcaaaaaaaaagaaaaaaaaagtggtttactccagtttttccctgcatttaataattttgttccctttaaggcatgtttttattttcttggctgaaaaggagtagcctgagaagaagtaacgtgtaggaagccttggccatgggaccaatagcctcataaattcctgatctctggaggacatcagggcctcctacctgttccattgtgacctgggagtctctccagctccaaggtggagggatggcttcactgaacacggagtctggaattccgtgcacactcatgtgaccggtgttccggaaaaagaagcaggaggcggctgggcgcggtggctcacgcctgtaatcccagcactttgagaggccgaggccggcggatcacgagatcaggagttcgagaccagcctggccaacatggtgaaaccccatttctactaaaaatacaaaaattagccgggagtggtggtgggcgcctgtaatcgcagctacccgggaggctgaggcaggagaatcgcttgaaaccggaaagcggaggttgcagttagctgagatcgtgccattgcattccagcctgggcaacaagagcgaaactccgtctcaaaaaaaaaaaaaaaaagcagcaggaaggacccactgagtacaggaagccgacagggcctgctccggaaaaccaggagctgtaaggtcagccgaaaggacgaagagacctgaagtcagtcaagtaagttttattaacctgctgggctgctcccccacagttagaggaggcagccccgcttacagactacagcagggctttatagggcgaggaactgggctggggtgtgagaactgagtcgggggtgcaggtgtcctgaccgcatcctggagatgtttttgccagctttgttatgcaaggtgggcaggtgttgtgaccgcatcctggaactgtctgccggttcagctgaagtcttttgaacaaacagttactggaagggtcagtggggaggaggtctacttctagcccggggggagttgtgtggcggtcacaaaggactgtattgtaagactgatgggggaaggaggggaacagtctggttgggttgaccctaacgggagcaagttctgcttccatgcaagtccaggtccaaggtcccagcgaggggctgtgggtagcacctgtcagtcacaccccacacagcgagcggattatttgaggattccgatcacctctcctgtcgctcaagccccaggggcgggacctggggcaccagccagtcagaggcgctgtgcggcaaactgtccaatcaggtgcgccgggaggaggggcaacttccaaagcccgaagcggtctcatttcccgccggccccccattcgggtccgggttttagttcctcggggagcccctggtgccccggatacggctgattttgtcgtgtgggacctgttctggctgctccagccccaggaaggacccaggacacccggaagccggaaatggtgagcgtgcggagccgggcgtccggagacctgaggaggagctggtcggaaccggcagtggctggacctgggcctccccgcggcgactgtgggggtctgggacccgagtcccccaggcgcagctcgacccttggtcccctcggtcgccgggtggagctggaccagccgccgggaccccgggtgtcctgtcccggccccggagccctctcagggcagctccgcgcccgcagccccgcgtctccccagatcgtgcgggggcctcaggagggtcttagggggaatcccgcctcgggtgtggggttcgtgcgggaggagccgtggcctgtggggtccccagttcctcctcccttaggcggtccccgtttccttcggagtcttccaaaggtgtgggaagctgggtttcaaacccacgaccccgtcccccagcttcgctcctcccagggctgcagtaaatccctaaatttccccgcattccccaaccctaagttctccctccagtacatccacttcacattattattattatcattatttctattatttttgagacggagtctcactctgtcgcccaggctggagtgcagtggcactgtctgggctcactgcagcctccgtcttccgggttcaagtgattctcctgcctcagcctcctgagtagctggaattacaggtgcccgccaccacgtccggctaacttgtattttcagtagagacaggttcaccatgttggccgtgctgaagtcctgatctcaggtatctgcctgcctcggtctcccaaagtgctgggattacaggcttgagccactgcgcctggcaagacccagtgttttaactgtcatcttttccaaggagccctagatggcacttcttaaaaagttcattttccgtttgtgaacatttcacatgcgagcaaagcagaaaataaccccctgacactccgatgttaaaaaaaaaaaatcactgtgcctgccctctttttaccttccctaggcgcggccaccttatcagacagtctttgggtggaggcttctcttgggaacttcacagggtattgggtcctcagcccaccctcctatctttctggtcctgggtttcaggaccgtccagggacttcttccagctgccctcggaagaacgggtgaaaagtctgtcctggcgtggttaatctttcctggttgtttgatgagcctcctagggaggagttcttgtcttttgaaaagaagtttccttaggaaattccagagggattccctgctggcccttgggggtggggtggggccagaaacagtagaaagaaacttctcccttctgaggcagctcagggtggcatgcagtggcacagtcatggcttactacggcctcaacctctggggcccaagcaatcctcctgcctcagtcttccaagaagctgggaccacaggcatgcgccacgcccggctagtttttattttttgtagagacaaggtctcactatgttgcccagtctgctctggaagtcaaaagcgattctcctgcccaggtggctcacgcctgtaattccagcactttgggaggctggggcgggaagatctcttgagcccagaagtttgagaccatcctgggcaaagtggcgagaccccatttctacaacaaatacaaaaattagccgggtatggtggcgcatgcctgtagtctcagctactcaggagactgaggtgggagagccacctgaacccggggaggttgagactgccgttagctgtgattgcgccactgcactgaacgacagagtgagaccctgtctttaaaaaaaaaaaaggaaatcttccattatggctgcagaatatgaatacattcccacaaaaaaaaggcatggtaggtcgggcgcgatggctcacgcctgtaatcccaacactttgggaggcagaggcaggcagatcacgaggtcaggagatcgagaccatcctggctaacacggggaaaccccgtctctactaaaaatacaaaaaaattagccaggcgtggtggcgagcgcctgtagtcccagatattctggaggctgaggcaggagaatggcgtgaatccgggaggcggagcttgcagtgagctggagatcgcgccactgcactccagcctgcgcgacagagcgagactccatctcaaaaaatacataataaaaaaaggcatggtagataagcagaaattagtgatttacaaagattcaccagcacatcagctcctctcctttgcaggttggggaatttgtgatggtggataactctgttctgttttgtgttatctggatttgacagattaacgctgaatcctttgggataagtttggcaacatctagaagtagtcagatatgatcttttgtttactgaatagtttattatggaaaaaatactgaatgacatctgaaagtgatagatactcatctcttttcctaaggatactaatctgtactcctaggtctctctcatgatctcatgtaatcccagttatttcccagagttgctgcccgtaatattaataccatcaccttaggtgttaggattttttttttttttttgagacagagtcttgctctgtcgcccaggctggagtgcagtggcgcgatctcggctcactgcaagctccgcctcccgggttcacgccattctcctgcctctgcctcccgagtagctgggactacaggtgcccgccattacgcccggctaattttttgtatttttagtagagacggggtttcaccgtgttagccaggatggtctcgatctcctgacctcgtgatccgcccgcctcggcctcccaaagtgctgggattacaggcgtgagcccccgtgcccggcagatatttttcaacgtatgctttttacatcataatcattttattcacgagacattttcagacttcaagaaaaatttcagtaggctttgttcttttctaaaaattgacttcaacggcttgtaacagcaattcaagatgaactgagggcaggaacactggcaaacacctgtaattctaggtacttgagaggctgaggcgggagaatcgatttagcccaggagttcaagtccagcctgggcaatatagtgagacccccatcttaaaaaatgtgtgtgtgtatatatatatatatataaattatatgtatgattatatatatatttataagttgtatgattatatatatttataaattttatgtatgattatatatatatttataaatttatttattttatttttttactttcgagacaaagtcttgccctgttgcccaggctggagtgcaatggtacaatcttggctcactacaacctccgctaaagtgattctcctgcctcagccctcccccacgcccggtagctgaacccggtagctgaatcctgagtagctgggattacaggtgccctccaccacacctagctaattttttttagctttagtagagacagggtttcgccatgttggccaggctggtctcgaactcctgacctcatggtcctcctgcgtcggcctcccatagtgttgggattacaggcgtgaaccatcacattcagccctatatgcattttagaacgggctttttttttggcggggggggtctctgttgcccaggctggagtgcggtggcacgatctcagctcattgcaacctctgcctcccaggttcaaacgattttcctgcctcagcctcccaagtacctgggattacaggcacctgccaccacgcccagccaattttttgtatttttagtagacacggggtttcaacatgttggctaggccagtctgaaactcctgagctcaggcaatcctcccacttcgacctcccaaagtgttgggattataggcatgagccactgtgactggctggtatttttatttctgaaaaaagaaaacaaaacaaaaaaaaccagacatgggattttgatagggattgtattgaatttgcagatcattttgggtagtagtaccttccaaataatgtaaagtcttttttttttctttgacacagagtcttgctctatcacccagactggaatgcagtggcacggtcttgactcactgcaacctccacttcctggtttcaagccattctcctgcctcagccttctgagtagctgggactacaagcgcatgccaccacgcctggctaatttttttttttgtattcttagtagagatgggattttaccatgttggccaggctggtctcaaactcctgacctcaggtgatttgcctgccttggcctcccaaagtggtgggattacagatatgagccaatgtgctggctttttttttttttttttttgaattggagtcttgctctgtcgccgaggctggggttcagtggcatgatctcggctcactgcaacctccaccttctgggttcaagcagttcttctgtctcagtctccggagtagctgggattacaggcacgtgccaccacacctggctaatttttgtattttcagtagagacagggtttcatcatgttagccaggctggtcttgaactcctgaccttgtaatccacccacctcggcctcccaaagtgctagggttgcaggcatgagccaccgcacctggccaaataatgtaaagtcttcgaacacatgaacacaagatatttttcaatttgtctttaatttcattcagcaacattttgttgtttttagtgtacaagtagtctttcgacttcttggttttgtaatttctaagcgttcaattctttttttttttttttttttttttgagacagagtctcactctgtcgcccagtctgggctatttggtgtcctgggttttatatttgttgaggctttttaaattattattattattattattattttgagatggagtcttgctttgttgcccaggatggagtgcagtggtgcgatctcagctcactgcaacctctgtctcctgagttcaagcgattctcctgcctcagcctcccaagtagttgggattacaggtgcctgccaccgcgcccgactaatttttgtatttttagtagagacggggtttcaccatcttggccaggctggtcttgaactcctaaccttttgatccacctgcctttgcctcccaaagtgctgggattacagatgtgagtcaccgcgcctggcctattcaattctttttggtgctattgtttgtggtattgttttcttaatttctttttcacattattcagttttggtgcatataaatgtagctgacttttttggtcttgagacagtctacctctgttgcccagactggagtacaatggtgtgatctcagctcactgcaacctctgcctcctgggttcaagtgattctcctgccttagcctctcgagtagctgggactacaggtgtgggctaccacacctggctgattgtgtatttttagtagagatggggtttcaccatgctggtcaggctggtcttgaacttctcacctcaagtgatctactcgcctcgacctcccgaagtgctgggattacaggcgtgagccaccgcacccagccccattgtttttcatatttgaaccatccttgcattttgcggataaatctctcttgatgatgtcatataatcctttaaatatgctgtcaggtatgatttgctagcatttatttgaggattttttgcattgatattcataaagggcatttgtagttttgttttttgtagtgtctgtctttggtgtcagcataattttgacctcatagagggagtttggaaatgtcccctcttcagttttggaagagtttgaggaggattgatagcaattcttttttaaatttttggtggatttcagcagtgaaactatttggtgtcctgggttttgtattcgttgaggtttttaaaattattattattattattttgagatggagtctcgttttgtcgcccaggatggagtgcagtggcgccatctcggctcactgcaacctctgcctcccaggttcatgccattgtcctgcctcaacctccccagtagctgggactacaggtgcctgcctccatgccagcctacttttttgcgtttttagtagagacggggtttcaccgtgttagccaggatggtctcaatttcctgaccttgtgatccaccctcctctgcctcccaaagtgctgaggttacaggcatgagccaccgcgcccagccaatttattatttttcttaatttattttatttttttgagatggagtttcactcttgttgcccaggctggagtgtaatggcatgatctcggctcactgcaacctccgcctcccgggttcatgggattctcctgcctctgcctcccaagtagctgggattaccggcgtccaccaccatgcccaggtaattttttgtatttttagtagagacggagtttcaccatgttggctagcctgtctcgaactcctgacttaaggggatccacccaccttggcctcccaaagtgctgggattacaggcatgagccaccgtgcctggctattttttttttattactatgccaatctcctgctactacagctctgttcagattttttgttttttcatgactcagtcttggtatattgtgtatgtgtagacatttgtccacgtaatcagttatataatttactgaagtattctaaaggacttctgaaattaagcctgagttgtacagttttttgtcctctgctgtatgtatgtattctgctgctgttgctgtgagtgtaaggggtgaggtgaggggaatcattctattgacctatgacttagcctcatttaaagataataggccgggcacagtggcttatgcgtgtagtcccagcactttcagaggcgaaggtgggcagatcgctttagcccaggagtttgagaggagcctgggcaacacagggagagcctatctctacaaaaaatacaaaaattagctgggtgtggtggtgcccacctgtagtagggaacaaggtgggatgatcacttgagcctgggaggttaagactgcaggggccatgattgtaccactgcactctagtctggacaacagagtgagatcctatctcaaaaaatattatatcaatctttatttatttatttatttggagacaaagtgtcactctgtcacccaggctggagtgcagtaacacaatcctagctcactgcaaccttgaattcctgggctcaagcaatcctcctgccttaacttcccaagtagctaggaccacagacacctgctaacataccctgctaatgtttttaaaaaatttttctagaggtggctataacttttaatttttttgttttttgaggtggagtcttgctctgttgcccaggcccaccatgccaggctaatttttctatttttaatagagaccagttttcactatgtaggccaggctggtctttaactcctgacctcaagtggtccaccctactactctacatgcctgctctgttattaaccaagttttcatatgaatactggcccattgaagactcttctttttccttgatctatttgtttatctctctgctaatagtatgctgtcctgaatgtgatggtttggaaatctttggtgttaggtaagccatccacctgctattcagaaggctttgacaattattagatgttaattcctgcacaccaggtggtgggaggtttggaaaagtagcttttgtttacctaaaatgtctgttttggggatttttttttttttttgagacggcgtctcgctctgttgcccaggctggagtgcagtggcatgatctcagctgactgtaatctccgcttcctgggttcaagtgattcttctgtctcagcctcccaaatagctgggactacaggcatgcgccatcacgcctggctaattttttgtatttttagtagagatggggtttcaccatgttggccaggctggtctcaaactcctgtcctcaagtgatccacctgcctcggcctcccaaagtgctgggattacaggtgtgagtcaccacacccagctgtattgggtatttatgaaattttgtaaggatatcatttggaagaagggacatcttattgagttttttctaggaacacatgttatctttccacttactccatactgctttgacattacctgacagaaattttaaaattcttccattaggacaattaaatattgatcatgaatcttatttactacttgattaaatttggtctagagtaaactgcttgcaagcttcaggatattctctcttggtataaccacatgggatgagctcagttccccaggggacaagttgtgacaacacgtgtgacatattgtctcccaggaaagctcattaaagactctgtgcccagagtgtttttctggggctagtgccctaggcaccacttctagtttggaacaaaagagtaggctttcagaaggaaaacagttcagtcagtaccatcctgtttgtcaataccataaaccgtttagccacagtaagccactttgtcacttaagttgatgggatccctctcgtagtctaagttgaccccgatagtagcaaaggtcgaacttggtaaacaggcctttctaaggatacccagactcaggactgctgaaatgagcgctgtctgcacaccaggtggtgggagtttgttgtgacaggtactagagattcactctgcaaagagcatttggggcaacgcagcagcacaactgactccctggacccaccacagagagggtggtcctcctctgtggctggctctctgagtaggtcagttctcacactggaactgctgcgagggaggaagtgcgtgtagataggaggaggccgatgactcaatcatggagtgagtgtttggagagcccggcgtcatgggatcactcatgtattgagtagagatccccagtgctgagtctcacccctcctcctccacacctgtgggatgtttcaggactcagtggcctttgaggatgtggctgtgaacttcacccaggaggagtgggctttgctgagtccttcccagaagaatctctacagagatgtgacgctggaaaccttcaggaacctggcctcggtcggtaagaaggacatttccttccttagtcaattagaagacaagtgtgttttggtcaccagtgtggttgcacagtttggaatgtggaaagagaatacgttggtgaataaatggggcatcgtgggccaggtacagtggcttacccttgtaatcctagtgctttgggaagccacggtgggaagattgcttgcgtccaggagtttgagaccagcctgggcaacatgatgagaccctgtctctttaaaaaaaaaaaaaaaaagtggggggtgggcaattgtggcagctcatgcctataatcccagcactttgggataatgttgagataatgttgagaaatgcagaagtattgctgggtgtgatggctcctgcctgtaatcccagcactttgggaggctgaggcaggtggatcacctgaggtcaagagtttgagaccagcctggtcaacatggcgaaacctcatctctactaaaaatacaaaattagctgggtgtggtagtgcatacctgtaatcccagctactcgggaggctgaggcaggagaatcactagaactcaggaggcggaggctgcagtgagcagagattgcatcactgcactccagcctgggtggcagagtgagactttgtctccaaaaaaaaaaaaaaatcaggcattgtggcagtgtttaatgaacttagaacctagtgatttttctgtaattttaaataattcataataatttctctgggtctacattttaggaatccaatggaaagaccaggacattgagaatctgtaccaaaacctggggattaagctaaggtaatctccactcacaagaggaagcagtgtctcttgagggaatcttagtaggtcaggaaaatttttaaaaaaatacaagacaaataagtacaatgttaggtttttaactgattattagaagattgctaccaaaaatctatccttcaatgtaatgtagatgttgagtgtctggacagggtactaagaatctgtgacatggatgtcactgtttggataactgctatggggagctgggtagcagaatcatcaatacacttcctttctaataattctgacccaggagaaaacctccacttttcctgattttggtagcagcataagtcttaagacatgtcaattagtagaaaagcattaataaaccaagcattgataatgcgtttgtcatttttcatagaagtctggtggagagactctgtggacgtaaagaagggaatgaacacagagaaactttcagccagattcctgattgtcacctgaacaagaaaagtcaaactggagtgaaaccatgcaaatgcagcgtgtgtgggaaagtcttcctccgtcattcattcctggacaggcacatgagagctcatgctggacacaaacgatctgagtgtggtggggaatggagagagacgccccgtaaacagaaacaacatgggaaagcctccatttcccccagtagtggtgcacggcgcacagtaacaccaactcgaaagagaccttatgaatgcaaggtgtgcgggaaagcctttaattctcccaatttatttcaaatccatcaaagaactcacactggaaagaggtcctataaatgtagggaaatagtgagagccttcacagtttccagtttctttcgaaaacatggaaaaatgcatactggagaaaaacgctatgaatgtaaatactgtggaaaacctatcgattatcccagtttatttcaaattcatgttagaactcacactggagaaaaaccttacaaatgtaaacaatgtggtaaagccttcatttccgcaggttaccttcggacacatgaaatcagatctcacgcgctggagaaatcccaccaatgtcaggaatgtgggaaaaaactcagttgttccagttcccttcacagacatgaaagaactcatagtggaggaaaactctacgaatgtcaaaaatgtgccaaagtctttagatgtcccacgtcccttcaagcacatgaaagagctcacactggagaaagaccttatgaatgtaataaatgtggtaaaaccttcaattatcccagttgttttcgaagacataaaaaaactcatagtggagaaaagccatatgaatgtacaaggtgtggtaaagcctttgggtggtgcagttccctccgaagacatgaaatgactcacactggagaaaaaccctttgattgtaaacagtgtggtaaagtctttactttttcaaattaccttagacttcatgaaagaactcatttggccgggcgtagccagtgctttggcaggaggcagggggatcacctgagcccaggagtttgagaccagcctgggcaacataagaaggccccatatcggctgggtacggtggctcacgcttgtaatcccagcactttgggaggctgaggcgggtggatcacctgaggtcaggagttcaagactagcctggccaacatggtgaaaccccgtctctactaaaaatacaaaaaaattaactgggcatggtggtgggcacctgtaatctcagctactcgggaggccgaggcaggagaatcgcttgaacctgggaggtggaggttgcagtgagccgagatcacgccattgcactccagcctgggcgacaaaagtgagactccatcacacacacacacaaaaaagccccatatcacgtggtggctcatgcctgtaaaaccagcactttgggaagccgaggtgggtggatcacgaggtccagagatggagactatcttggccaacatggtgaaaccccgtctctactaaaaatacaaaaattagccaggcgtggtggtgtgtgcctgtagtcccagctactcgggaggctgaggcaggagaattgcttgaaccagggacttggaggttgcagtgagccgagatcgcgccgctgcactccagcctggtgacagagcgagacttcgtctcaaaacaaacaaaaaaaagaaggccccatatctccaaagaaaaaaaaaattaactgggtgaggtggtgcatccctgtagttctagctgctcagaaagctgaggtgggaggaacccttgagcctgggaggttgaggctgcagtgagctgagatcgtgccactacactccagcctggatgacggtgacactctgtctcagaaaaaaagggaaagaaataattctcatttatacaggagagaaatcctatgaatgtaaggaatatgggaatacattcagtttccaaagatatgaaaagactaactggaaaaaaatccaaagacctcagatattccagttctattcagagccataaaaggactcatactggagaaaaattgtagaaatgtacagaatatggggaaactctcattgctctcatctccattcaaagacacgtgtcagtgcacactggagatggatggtatgaatcgaagaatacacactggatggaaacgttagtagtttggaaaatacaggaaacttccattttaacaataattaaaattcacatgggctgtgcacagtggctctcccctgtaatcccagcattttgggaggctggggtgggtagattgcttgaggccaggtattcaagaccagcctggcaacctggagaaatcccatgtatacaaaaaatagaaaagttagccagggatgatggtgttcgcctgtagtcccagctactcaggaagctgaggtgggaggattgcttgagtttgggaggtcgaggttgcagtgagtggagattgcgccactggactccagcctgggcaacagtgagaccctgtctaaaaaaattaatcatgtgagaacatccactcgaaagaaatcctataaacgtaagtaattttgaaagcctgatgcaaattaattattatataatgctcaaaaacttaatcatgaatgagttattacacaaagttataaatatatagcatttatcagtggctcattcttttttctttcttttttttttttttttttgagatggagttttgccctgtcgcccaggctggagtgcagtggcacaatctcggctcactgcaacctccgcctcctgggtgtgagcaattttcctgcctcagcctcctgagtaactgggattataagcacatgccaccacgcctggctaatttttttgtatttttagtagagacggggcttcaccatgtggttcaggctggtctcagactcctgaccttgtgatccgccctccttggcctcccaaagtgctgagattacaggtgtgagccaccgcgcctggccttttttttttttcccgagacacagtctcactctgttgcccaggctagagtgcagtggcgcgatcttgactcactgtaacctctgacttctgggttcaagcaattctcctgcttcagtctccgaagcatctgggattacaggcgcacgccaccatgcccagctaaatttttggtatttttgtagaaacagggtttttccacattggccaggctggtcttgaactcctgacctcaaggaatccatcctcttcagcctcgcaaagtgctgagattataggcatgagacaccttgcccggcccctgtgactcattcttaaaaaggatctttggattatgggtttccacttttgcaaggaaatgtgagaatgatactctttaagcagtggtacctgaggtttaataggaagtgtttttatcctaagttagttaataaaatttttttctatccattttggttttcatttttttctatccattttaaagtgttggatctgtgggtgaagtgaaatttatttctaatatgtaagcaggtttaatttttatgtagtgtttaattgttctgtgatgaatgggccattacaaaatgagtctatttttgtttgttttcttttgtttttgagactgagtcttgctctgtcgccaggctgaagtgtagtggcgcgatcttggctcactgcaacctccacctcccgggttcaagtaatccccctgccttagcctcctacaggcgcgtgccgacatgcctggctaattttttgtattttagtagagacggggtttcattgtactggccaggatggtcttgatttcctgaccttgtgatccaccccaccttggcctcccaaagtgctgagattacaggagtgagccactgcgaccggcccatgagtctttattaatagagatttcttactggtgttatgtggcagattctgcatattcctcacccatcatatgtattccactttcctttattatggggaaaactactctttttggcatgatacaatgttgactccattttctttgctaataaggacttggtatcaatttatcagtatgtaaagtttaccatagagtattgtctcatgtgaatcattcccattttttgctctttactctttgtcgttatttctgagtattatttggatggttcattttgacttaaggatagccctgtgatatgacaatatttttatctaatctgatggagaaagcatttagtctcctgatcaagtatgatgttagctgcaggtttttaataaatgccttaattcagtttgaagaagttcccttctgttcattatttattgagtgtttcatcaagttgtattgaacttttttgcatctattgggatgatcccctttttttttttttggaaacaaagtttcacacttcttgcccaggctggagtgcagtggcacaatcttggctcactgcaacctccgcctcccaggttcaagtgattctcctgcctcagcctcccaagtagctgggattacaggtgccctccaccacgactggctaattttttgtatttttagtacaggtcaggtttcaccatgttggccaggctggtctcgaactcctgacctcaggtgatctgcccgcctcagcctcccaaagatcctgtggtgtttagtcagttttgcattgctgtaaagcaatgcctgacactgggtaatttgtaaagtagagatttcattggctcacgattctgcaggttatagaggaagcatggtatcacatctgctgggtttctggtgaggcctcagagctcttactcttggcagaaggtgaagtgggagtaggtatgtcacaaggcaagagtaggagcaagggagagagagggggaggtctcagactctcttgagtgagcattcactcatccctaagggatggtgctaggccattcatgacggatcagccccaatggtatgatacttcccactaggcccaacagccaacactggggatcacatttctttttttttttttttttttttttttttttgagatggaggtttgctctgtcgccgatgctggagtacaatggcgcgatcttggctcactgcaacctccacctcctgggttcaagtgagtctcctgtctcagcctcccaagtagctgggattacaggcacaccactacgcccagctaatttttgtatttttagtagagataggttttcaccatgttggtcagcctggtctcgatctcctgacctcgtgatccgcccgccttggccttccaaagtgttgggattacaggtgtgagccactgtgcccagcctggggaccacatttcaacaagagatttggagaggacacatctaagtcatataattccacccctatccctccaaatctcatattctcatattgcagaatacaataatcccttctcaatagtcacccagagtcttaactcattccagcattaactcaaaagtcaaaagtctcacatgagactcatgaaatgaaatgtccatattgtgggggtgggggggcgggacggagtaaaactgccgggcctttgtatgcaatcagttaagttgttattagcttaaaatagacttcgagagctaagattctttatgtaaccctcatggtagcccagaagagaaaacctatagcagatacgcaaaagagaaaggaatcaaagcagaaaatcattaactctcaaagagagacagaaagaggaagaaaggaacaaaggatctataaaacagtgagaaaacagttaaaatgggaatagtaagtcttaacctatcaacaattactttattttttattttattttattttattattttttgagacagagtctcactctgttgcctaggttggagtgcagtggctggcgcgatctcagctcactgcaacctccgcctccttggttcacgccattctcctgcctcagcctcctgagtagctgggattacaggtgcctaccaccacactgagctaatttttgtatttttagtagagacggggtttcaccttgttggccaggctgatctcgaactcctgacctcaggtgatctgcctgcttctgcctcccaaaatgctgggattacaagcgtgagccaccatgcctggcctctatttatttagagacaagttctcgctctgtcgcccaggctggagtgcagtggcatgatctcacctcactgcaacctctgcctcccaggttcaagcgattctcctgtctcagcctcctgagtagccggggttacaagcacatgccaccacacctggctaatttttgtatttttagtagagacagggttttaccatgttggccaggctggtcttgtgacctcaagtgatctgcctgcctcaacctcccaaagtgctgagattacaggtgtgagccaccatgcttggccaacaattactttaaatgtaaatggattaaatttccaatcaaaatatatagagtggctgaatagatttttaaaacacatgaaaaacactactgaactataagctacctacaagagactcccttcattattattattactattctttgacacagagtcttgctgtgtcgcccaggctggagtacactggcacgatcttggctaactgtaacctctgcttcctgggttcaagtgattcttctgcctcagcctcctgagtagctggaactacaggcatgcaccaccacgcccagctaatttttgtatttttagtagagacagtgtttcaccatgttggctaggctggtctcgaactcctgacctcatgatctgcctgcctcagcatcccaaagtgctaggattacaggtgtgagccacgactcccttcatttttattttttattttttgagacagagtcttgctctgtcgctcaggctggagtgcaatggtgcgatcttggctcactgcaaactctgcctcctgggttcaagggattctcctgccttaggctccagagtagctgggattacaggcgtgctccatcacacccggctaattttttgtatttttagtagaaacggggtttcaccatgttggccaggctggtttctaactcctgaccttgtgatccacccgcctcggcctccgaaagtgctgggatcataggcgtgagccactgcgctcggccacgactcccttcatttttaaggatatactggtcgggcgcagtggcttacactttgggaagccaagacaggcagatcacttgaccccaggaggtcgaggctgcagtgagctgtgattgtgccactgcgctcgagcctgggcaatggagaccctgcctcaaaaaaaaaaaaattgtatatgcaaacaatgtaatattccttagccttataaaaggacatccttttacatgctacaacatggatgaactttgaggacattatgcagaaataagccactcgcgaaaagacaaatactgtgtgatcctacacagatgatccatggaaaattgtcaaattcataaaatcagaaagtgaatgttagctgctagcaggtaaggaggagagggggaagtgaggagctgttattcagtgggtacagagtttcagttttgcaagatgaaaactttctggagattggttgcaaccccaggttagtatagttggtattactgatctgtacgcttaaaaatcattaaggactgggcatggtggctcacacctgcaattccagcactttgggaggctgaggcggccagatcacttgaggtcaggagttcgagaccagcctggcaagcatggcgaaaccctgtctctactaaaaatacaaaaattagccaggcgtcgtgacacatacctgtaatcccagctactagggaggctgaggcacgagaatcgcttgaacccaggagatgaagttggagtgagccgagatcgtgccactgcactccagcctgggacacagcaagactatgtctccaaaataaaacaaaataataaaaaatatataaaatggacatacacacatagcccttcagacaaacaaaatcacgaccttgtcactgcacatacagctgcagacacaaccaactcacaagccctccagagtaatgtcccagtgacaccaacggattcccccaggcaggcagagcccaggcccttggcactccatccctaccggcactccatccctactgctttccctccctcctggggactaaggcccacctgatacatttttaaatatatatatatataatatattttatttatattaaatattaatatatttttatttatattaatatataaataaattatatatttatctattacattaatatttatctattacattaatatatatttatctattacattaatatatatttatatattacattaatatatatttatatattacattaatatatatttatatataagttatatatttatatattaatatatttatatatgttatatatttatatattaatatatttatatataaatatataaaaattatatataatataatatataaatatattaatatatttttatatctaaatatatatttatatatataaataaattaatatatttatatacaaataaattatatatttatatacaaataaattatatatatatacaaataaattatatatatacaaataaattatatatttatattatatatttatatacaaataaattatatatttatatacaaataaattatatatatacatatttatatacaaataaattatatatatacaaataaattatatatttatatatacataaattatatatttatatataaatatattatttatatataaatttatatttttatatataaataatatatttatatttatatataaataaactatattatatatttatatataaataaattatatatttattatatatttatatataaactatatattatatatttatatataaactatatatttattatatatttatatataaactatatatttattatatatttatatataaactatatatttattatatatttatatataaactatatatttattatatatttatatataaactatatatttatgttatatatttatatataaactatatatttatgttatatatttatatataaactatatatttatgttatacatttatatataaactatatatttatgttatatatttttatataaactatatatttatgttatatatttttatataaattatatatttatgttatatatttatatataaattatatatttatgttatatatttatatataaattatatatttatgttatatatttttatataaattatatatttatgttatatatttttatataaattatatatttatgttatatatttttatataaattatatatttatgttatatatttttatataaattatatatttatgttatatatttatatataaattatatatttatgttatatatttatatataaataaattatatatttatgttatatatttatatataaataaattatatatttatgttatatatttatatataaattatatatttatgttatatataaataaattatttatttataaatatataaaattatttatatatttatatatataaattatttatatatttatatatataaataatttatatatttatatatataaataatttatatatttgttatatatttatatataaataaattatatatttgttatatatttatatatatttatacagaaatataatttaaaatatatatatttatatataaatatattttaaattatatttatatatttatatataaatataatttaaaatatatttatatataaatataatttaaaatatgtatttatatatatatattttttgagatggagtctcgctctgtcacccaggctggggtgcaatggcgcgatctcggctcactgcaatctctgcctcccgagttcaagcgattctcctgcctcagcctccagagtagctggggctacagctactcataaagttatgagacctcatatctttttttttttttttttttttttagatggagtctcactctgtcgcccaggctggagtgcaatggcatgatctcggctcactgcaacttccacctcccgggttcaagcaattcttgtgcctcagcttcctgagtagttggaattacaggcccctcccaccacgcccagttaatttatgtatttttagtagagatggggttttgccctgttggtcaggctggtctcaaactcctgacctcaggtgatctgcctgcctcggcctcccaaagtgctgggattacaggcataagccactgcgcctgtcccagagacccccatatcttaaaaaattaaattagctgggtgtggtggcgtgtgcctgtggcctctgaggcaggaggataacttgaggcctgaatttgtgactagcctgggcaatatagtgagacctggtctcttaaaaaaatactaaatctttatcatttacaaagaaatgggaactctgagaccccaccagtttaaataagtttacgtggcccaatgtaagttaaacagggtgttccaggattggaatttatttttaattttagagatggtctcactctatctggagtgtggtggcgtgatgatggctcactgtagccttaaactgggctcaagcgatcctccagcctcagacttccaagtaactgggaccacaggctctatcaaccacacttggctatctatctatctatcatctgtctatctgtctgtctgtctgtctatctatctgtcttatctatacagagtttcgctcttgttgcccaggctggagtgcaatggtgtgctctcagctcactgcaatctctacctcctgggttcaagcaattctcatgcctcagcctcccgagcagctggggttataggcttgagccaccactgcctgctaattttttgtatttttagtacagatggggtttgatatatgggttaggttggtctcgaactcctgtccttaagtgatccacctgccttggcctcctaaagtgtttggattacaggtggagccattgcacctggccagataaaagtttatactgctctttttctctctagttttttttttttttttttttttttctagacagagtttcactctttttgcccaggctggagtgcaatggcgtgatctcggctcaccacaacctccacctcccgggttcaagtgattctcctgcctcagcctcctgagtagctgggattacaggcatgtgccaccacgcccggctaattttgtatttttagtagagacgggggtttctccatgttggtcaggctggtctcgaactcctgacttcaggtgatccgcctgtcttggcctcccgaaggaccgagattacaggcatgagccaccacgcccggctttcttttttttttttttgagatggagtctcgccctgttgcccaggctggagtgcagtggtgcaatctcggctcactgcaaccgctgcctcctgggttcaagtggttctctgccccagcctcccgagtagctaggattacaggcacccgccaccacgcctggctaatttttgtatttttagtagagacggggtttcaccatgttggtctggctggtctctaactcttgaccttgtgatctgcctgcctcagcctctcaaagtgctgggattacaggcgtgagccaccacgcccgcccggccctctctagtttcttaaggtggaagattacattattattattattttttgaaacggagtcttggtctgtcacccaggctggagtgcagtggtgcgatctcggctcactgcaagctgcgcttctcaggttcacgccattctcctgcttcagcctcccgagtagctgggactacaggtgccagccaccacgcccggctaattttttgtatttttagtagagacggggtttctccgtgttagccaggacggtctcgatctcctgacctcgtgatcgcccgcctcggcctcccaaagtgctgggattacaggcgtgagccactgcgccagcccaagattacattactgatttaaatatttcttttctgatgtatatatccaatgctctaaatgtagctctaagcactgtttttgctatatcctccccacccccgctttttttttttttttttttttttgagatgcagtcttgctctgttgcccaggctggagtacagtggtgtgatctcggctcactgccacctctgcctcccgggttcaagcgattcttctgcctcagcctcctgagtagctgggattaccggcgtgcgcctccacacctggttaatttttttttttttgtatttttagtagagatggggtttcaccatgttggccaggctggtctcgaacccctgccctcaagtggtccacccacctcagcctcctaaagtgctgggattacaggcgtgagccacctcgtccagcatatcccacaattttttttttgagacagagtcttgcttaaagttcaaaatcagtaaactggacacacttaactactattattattttcaagacggagtatcgctgctctgttgcccaggctggagtgcagtggctcgatctcggctcactgcaacctctgacccccaagttcaagtgattctcgtgcctcagcctcctgtaatctcagctgcgattacaggcgtgtaatctgtgcctggcctcattcaaatcatgacctaccgcgcctggcccagctaaatttttttttgtttatttttttgtagagatggtctcctttgcccaggctggtctccaactcctggatgcaggccatcttcctgccttgacctcgcaaagtgctgggattgcaggtgtgcacctggcatggttatggtttaacattatgaatataattcatgccacagaatggtgcacttaaaatggataaaataaaattttgtatgaaaaaccctttagctctatgaaacacccagttaggctgggcacggtggctcatgcctgtaatctcagcactttgggaggccgaggtgggaggattatttgaggtcaggagttcgagaccagcctggccaacatggtgaaaccccatctctactaaaaatacaaaaattagccgggtgtggtggcgggcgactgtaatcccagctacttgggaggctgaggcaggagaattgcttcaacccaggaggtggaggttgcaatgagctgagattgcgcctctgcactccagcctgggaaacagagtgagactctgtctcaaaaaaaaaaaaaaaaaaaaaaggagaaaagaaacaaccagttaagatgatgaaataagctcctgagtgggaaactattttcaaactacacatacagcaaagaactactatcttgaatatataaaaaaactgtcacccttgtttagaaacacagacatctaacagtgatgtcaccgtatataataaagggattctaggtttgagccaccactcctgactcttaagagaattttgaaatgtaaaaagccatgatatctccaaggcaatcaaattcctattctcactggtatatttaagaaaaacaggtcacacgcatttgctcacatctgtgatcccagcactttgggaggccaatcgcttgagcccaggagttcaagaccagcctgggaaacatagtgaaatcccatctgtattaaaaataaaaaaattagcagggtgtggtcacctgcttctgtagtctcacctactcaggaggctaaggtgacaggattgcttgagccaggaggtgaaggctgcagtgggctatgattgagccattgcactccagccttggtgacagagtgagactgtcaccaaaaaaaaaaaaaaaaaaaaaaaaggctgggtgtggtggctcatgcctgtaatcccagtactttgggaggccgaggtgggcggatcacttgtgatcgggagtttgagaccagcctggccgatatatttggtgaaaccctgcttctactaaaaatacaaaagttagccgggcgtggtggtgcgcgcctgtaatcccagctactcaggaggctgaggcaggagaatcgcttgaacccgggaggtggagattgcagtgagccgagattgtgccactacactccagcctgggcgacacagcaagactctgtctcaaaagaaaaaaaagaaaaaaagaaaagaaaaaagaaaaacaaaaaaggggtacgtaaatttggcataaacctggaaactcaatactgttaaattggaccaaaactcctaatgaatttacttatttcaaccactttattcaaatatacatatcctacacaatacacccagttaaagtgcataattcataggtatagtatattcacagatacatgcaatcatcaccacagtggatttgcatcacctcaaagagaaacccctgtaccctttaggtatccactcccccaatcctcccattttttttactcaacacccagccctaggcagtcagcaattgactttctttctcagcagatttctctgctctggactttcatgtgaatgaaatcataccatacggggaatttttaactgggtttcatttactatagttttttgaagggatatccatgttgtagtatggtcctgtacatcatttagatttatgatggaattattaatattttccattgtctggctattacatattttatccatgcattcaatgatggattatttggtttccaccttttggctgtcatgaataacactgctataaacattcatgcccaaggtcttgtgtggacatatgtttctatttatttctacctacaacaaaaactgatgtcacatggaaattctgtttagtagtttcttttaaatttaaaaggtttgaagatttattatttttttcttgtggcaaaaactcttaagattaaatataacggctgggcatggtggctcacgtctatcccagcactttgggaggctgaggcaggtgggtcacctgaggtcaggagttcgagaccagcctggtcaacatggcgaaaccccatctctactaaaaatacaaaaattagttgggcatggcggtgtgtgcctgtaattccagctacttgggaggctgaggcatgagaattgcttgaatctgggaggcggagtttgtagtgagccaagatcatgccactgcactccagcctgagcaacaagagcaaaactctgtctgaaaaaaaaattaaatataccaagttaaccccaagtgtataggtcagcagtgttaaatctattcacactgttgggcaacagatcttcagaccttttcaatcttgcaaaacctaaaatctatatccattaaacactacttccaactgcccaccaccccagccccattctacagcccccattctcagcaacaaccttgctgcactgtttctgcattttgactacttcagctagtccatatgaatggaatcctacagtatttattgtttgatgactgcctcatttcactcagcctaatgtcctcagggttcatcggtgtcgtaccaactgacaaagtttctttctcttctctttgagatcttgttgtgaaatctctgggatatacacccagaagtggaattactggatcatatggtcataccatttttcttttttttatttatttttagatggagtctcactctgtctccaggctggagtgcagtggcatgatctcggctcactgcaacctccatctcctgggttcaagccattctcctgcctcagcctcctgagtagctggaattataggtgcgcaccaccacgcccagctaatttttgtatttttagtagagatggggtttcaccatgttggccaggatggtctcgatttcctgacctcgtgatccacccgccttggcctcctaaagtgctgggattacaggtgtgagccaccatgcctggccttcatttttttacaacctgttcttcacaatgctgtttttcataatggctacaccactttacaatcccaccatcaatgcataagcaccccaatatctctatgtcttcaccaaaactttttatttatttatgtattatttattgagatggagtcttgctctgttgcccaggctggagtgcagtggcatgatcgcagctcactgcaactgccgcctcctgggttcaagtgattctcctgcctcagtccccggagtagctgggattacaggcatgtgccaccatgcccagctaatttttgtttcaccatgttggtcaagctggtctcgaactcctgacctcgtgatccgcctgcctcggcctcccaaagtgctgggattacaggcatgagccaccgcacctggccggctattctttttttaaattattattattattattattattattattattattattatagttctggcctgctattctgatgttcgccattctaattggtgtgaggaaatatctcattatgtgctttttttttttttttaagacagagtttcttgttgcccaggctggagtgcagtggcgtgatctcagctcactgcaacctacgcctcctggttcaagcgattctcctgcctcagcctccccagcagctaggattacaagcatgtactaccatgcccagctaattttgtatttttagtagagacagggtttcaccatgttggccaggctggtttcaaactgctgacctcggatgacccacctgcctcggccttccaaagtgctgagattacaggcgtcagccaccatgcccgacctcattatgcttttaatttgcacttctcttatgatctctgatggtgagtgtgtgtgtacagatatttcaatggcatccttttgtattttgcaaaaacagggagtatatatatactatttttgcaaaatagcagttgaaattttggtgcagattgtattaaatctgtagaccactttgggtagtggagacatcttaacaatattaagtcatctgggctggatgcagtggctcacgcctgtaatcccagcactttgggaggccaaggccagtagatcacttgaggccagtttgagactagcctggccaacatggcaaaaccctgtctctattaaaaatacaaaaattagccagatgtggtggtgcatgcctgtaatcccagctactcaggaggctgaggcaggagaattggttgaacccaggaggctgaggttgcagtgagccgagatcgtgccactgcactctagcctgggagacacagtgagactgtctcaaaaaacaaaaaaacaatataaagtcatctgatctatgagcatggaattctctgagaatacagaaaaacacaatagttctttttcttattctcaaacaataacatgcaacacttctgcgaccagatgtgggggctctttccacacacaccaagcaagcaagtctgcagagcattcctctccagcagacaccaggaggctgccccctaactgaactaaattctgatgctacttggagatagcatcagattccacaggttcaggtcccagtgccataagactgccctcacctcacgtgccagttaattaattaattaatttttttgagatggagtcttgctctgtcaccaggctggagtgcagtggtgcgatcttggctcactgcaacctccacctcccacgttcaagccattctcctgcctcagcctcccgagtggctgagactacaggtgcctgccaccacgcctggctaatttttgtatttttagtagggtcagggtttcactgtgttggccaggatggtctcgatctcttgaccttctgatacacctgcctcggctgcccaaagtgctgggattacaggcgtgagccaccgcgcccagcctggaattcttaacaggaccattaggattaaataaattttactgggggtctgaagaaatgatgtaatcaagcgcccggcttgattacatcattggatattggtgatagacttaaacttcagcacctctctcctccaggtgaggcagggaacttaaggccaatttgtgctgacttcctaaagctgggtcaaaggaaaacaccaaggtcttggggcagagaatctaaggccaattaacgccaactgcctaaagctaaaccaaaagaaaaaaccccatctccccaagcctggagcagcaaaggatggaaggctactttccctccagccctcccacttccaccaacatctcagatggaaagtgccctggattggctgcgggccaagcatggcccatcccttcatcttcagagggcaccaattcacctcagcctttaattagccaccagccaaatccttcatccagataaggggtaactgatggggaccttgaaaggagtacttaaaacccagaaaactttgtaactggtcccttgagctgcttgctcgggctcacttccaccctgtaatgtgctttctccctttaataaatccttgcatttgcggcttcggtcctgggtttcgttcctttgtgtgttttcttcagttctttgttcaaaaactccaaggacctggacaactcacactcatggccttccttccagtaacacaggggagtcaggggtgaagcagagtatcctaaccatctaatcacatggttgtttcccctggcaaccaccccatcctgaggctatgcacggcccgcagtcactagtcacctcaacatcactttgattccaaggcttttaggagctgtaggccaaggaaacaggaacaaaccaaaataaatatttcataatatcacagatgtctttctaggtatttgtatctttctttcttttttttttttttgagatggagtttccctcttgtcgtccaggctggagtgcagtggtgtggtcttgtctcactgcaacctcttcctcctgggttgaagtgattctcctgcctcagcctcctgagtagctgggactacatgcacgcaccaccacgcccggctgatttttgtatttttggtagagacggggtttcaccattattggccaggctggtctcaaactcctgacctcaggtgatccacctgcctcggcctcccaaagtgctgagattacaggtgtgagccactgcgcccagcctctttagtttcttttagcaatgctttgtagctttcagtgtagaagtcttttattttcttggttacatttattctcaagtatttgtttttgtgccattgtaaatgggattgttttcttaattttcttttctgcctggtcaccactagtgtgtagaaacacaattcattattatttttcttgctgattttgtttttttcgcctttgctgaaatcccatagagtcagccctccatattcctgggttctgcatctatggattcaaccagctacgaattgaaaatattcagaaaaaaattggatggctgtgtctgtaatgaatatgtgcttttttcccccttattatctcctaaatgacttattataaaaactatttacacagcagttgcattgtattaggtattataaataacctacagatgatttaaagtatataggaagatgagtgtaggttatgagaaaagaacttttatctgaagaatgtgagactgtggcaggccaggtctcactaacgcaggcctccataacaactgtttcagtactgactgagtggttaagttaaatattaaaagccagcgcccttacataagggctgggatgtaacaaaagcccaccaaaaagtttctcctaggcctgcctttcttgggctttaatgcatgacaacaataatgaaggaatttttttttttgagatggagtctcactctgttgcccagctgcgatctcggctcactgcaacctctgcctcccaggttcaagcaattctcccgcctcagcctcctgagtagctgagactacaggtgcccgccaccccacccggctaattttttgtatttttagtagagatggggtttcaccgtgttagccaggatagtctcgatctcctgacctcgtgatccgcccgcctcggcctcccaaagtgctgagattacaggggttagccaccatgcctggccaagaagttgttttatcttgtttactgctgaaggtgtcagggtaaggggggcccaggtgggctgaagtttcctcttgctcacagcgcagacagttgcccggactaaggaagccgacatctttgctgtcctggcgctccggtacctccagccagagctcggccgcctcagcctctctccatggacatggcgggcgcatccagttcaaagaatttttaaatttccatcttgatttcatccaacgctcatccagaaacaggttgatctttaatttttaatttaatttccatgtatttaatttctaaaatttatttaatttccatgtatttgcatggttttgatggttcatttggagttgattttcacttttattccactgtagtctgagaaaatagttgatataattttgattgtcttaaatttattgagacttgtggcctatcatatgtctatcttggaaaatgtttcaagtgctgatgaataaaatgtatattctgcagttcttaggtagaatttctgtaaatattttttaactccatttgttctaggatatagttctaagtccattttttgttgttgttgttgttattattgactttctgtcctgatgacttgtctattgctgtcagtagagtattgaagtccctcattattattgtgttgtcatctatttcatttcttaggtctagtagtaattattttataaatttgggagctccagtgttaggtgcatgtatatttaggattgtgatatttccctgttggactagtcctcttatcattatataatgtccctcgttgtctttttttttttttaactgtttttgttttaaagtctgttttgtctgatgtaagaatggctactactgctagcttttggggtacatttgcatggaatacctttttccaaccctttgccttaagtttaagtgagtccttatgtgttgggtgagtctcttgaagacagcagatatttggcttgtaaaatcttttttttgagttggagtttagttctagtccaggttggagtgcaatggcgtgatctccgctcactgcaacctccgcctcccgggttcaagcgattctgttacctcagcctcctgagtagctgggattacaggcattcaccaccatgtctggctaatttttttgtatttttagtagagacagggtttccccatgttggtcaggccggtctcaaactcccaacctcaggtgatccgcccacctcagcctcccaaagtgctgggattacaggcatgagccactgcacctggtctggtaaactcttatccattctgccattttgtgtcttttaagtggagcatttaggccactagattagtagcatttaggccaataatcactatcaattacaccaccatacattacaatgcctgtcattgaaaggcttgaacacgttgtaatccattcatctgtattcaagtttgcagttatggtggaaactttggcctattgatcatcctgctgattaaatagtctgtcaagagaaagcagagatgcatgagcatcaacatggaaaacagtgataatggtagtgtgtgccaggattcagatatcttcccagtattgttttccccaaacctctttattcccaactaaccatttgttttgttaccactggggtttccaggtagtaagaccatttgctactgaccaagagttggtatacaagtgacaaatccttctggcctcctcttgaatagctcggaggatggctactagttcagctaactggctgttcccacccctttcttcatcagaaatgtttatgtttttaacaggattataagccatggccttctagtatctggtcccaccaatgtatttggtggatccatccataaaccaagcatgtttctgatcctctgggcatagttctttgaaggatctgccccattgggcaggggaggtttccttccctatctgcaggacttgctcggtgatttcctgagctgggaagtttcgtacatcctcatgtaaaagtgataccctctttggttttggtttagatgggggacttgtatatcacaagtagctgtaaattaaccgctaatgctgcaccagacactataacccatgtcctatagcttaacaatggatagccaattactaatcaatgtcatttctgtaagccaatgagaattcctgacgactttataccagccactccctgtaccccattttgcctttaaaaacctgcttgtggccaggtgtggtggctcatgcctgtaatcccagcactttgggaggcagaggcatgcagatcacttgaggtcagaagtttgagaccagcctagccaacacggtgaaaccctgtctttactaaaaatacaaaaattacccgggtgtggtggcaggtgcctgaaatcccagctactcaggaggctgaggtgggggaatcgcttatacccaggaggtggaggttgcagtgagccatgattgcaccactgcactccagtctgggtgatagagtaagactctgtcgcaaaaaaaaaccaaaaaccaaaaaacaaaaaacaaaacacacgcctgcttgtgacaaaggcggaacggagttcatatccaaggtcacttgggtccgagtctcccaggaagctgttctctctttggctccagtaaacttgttaaattatacttgtgcctcagcctctttcttttaggttggaattttttttttttttttgagacggagtcttgctctgtcacccaggctggagtgcagtagcatgatctcagctaactgcaacctctgcctcctgggttcaagtgattctcttgccttagccttctgagtagctgggattacaggcacatgccaccacacctggctaatgtttctatttttagtagagatggggtttcaccatgttggtcatgctgatctcaaactcctgacctcatgaaccgcccgcctcggcctcccaaagtgttgggattacaggtgtgagccaccacgcctggccttaggttgacatttctataaaaatactgtgccattttatataagggccttgagtttccataaattttggtaccaaggggcacaatggagccagttccccagggatactgaagaactacattaattttaagttttaaaaatggaatctttcttttttctttagacagggtgtcgctctgtcacccaggctggagtgcagtggagcaatcttggcccactgcaacctctgcctctgggcctcaagcgatcctcctgcctcagcctcccaagtagctgggactacaggtgtgagccacgacacttggttgatttttgtatttgtgtgtgtgtgtgtgtgtgtgtgtgtgtgtatatgtatagttttttttttttttgtaactgtctctgttggccaggctggagtacagtggtacaatctcggttcactgcaacctctgcctcccgggttcatgcaattctcatgtctcagctttcctgagtagctgggactataggtgcgtgccaccacgcccagctaatttttgtattattagtagaggtggggtttcagcatgtgggccaggctagtctcaaactcctgacctcaagtgatctacccacctcggcctcccaaagtgctgggattacaggtgtgagccactgtgcttggccaagttttgtattttttgtagagatagggtttcaccatgttgcccaggctggtcttgaactcctaaactcaagcaatttgccctcctcggcctcccaaagtgctgggattataggcatgagccaccatgactggcctaaaaatggaatctttagggatttcttcacagggatcttgccattaacaaaaagagataattttacgtattcctgtccaatatggatgccttttttttttttaatcatctaattggtctgcgagggccggtggtatgtccaacaggagtgtccttttaaagttttgtcttttactgctgagtatggtgttagctgtgttttcaaatacggcttttattatgttgagtatttttcttctattcctagtttgttaggttgttctttttttaatcaagaaaggggtgttgaattttgtcagacgcttttagtatacattcagtttccaaatggctcaaattatggacttttgtttcaggtttttttgttggaataaagaaaacaaaaatctatcttccttccttcactgtggtttttttttttttttttgagatggagtttcgcccttgttgcccaggctggagtgcaatggtgcgatcttggctcactgcaacctctgcctcccaggttcaagcgattctcctggctcagcctccctagcagctgggattataggcacccgccaccaggcccagctaatttttttgtattttcagtagagacggtgtttcggtatgttggccaggctgatctcgaactcctgacctcagacgatccacccacctcagcctcccaaagtgctgggattacaggcgtgttgcaccgcgcccggctctccttcactttttgttttctgctcactggaaatactctggggaggggagggccctctctactacagcatgtgttattttttttcctccagagatcttcaaataactactatcagttaggggcctcctgcatggtgagagatgctttgtgtggtttaaggacacaaggctttatttaggtctgaactaacatctttgctgaactaaaggatgccatgagggttatttctgacaaccttggaggatctgggtctttgttgcgttagaggcgtgagcagcaacagcagcagcagaggtatttaagggtcctggagagtgtggacctcaagacaccatctaatagcagcttcccagtccccactctttttgttctttctgtttttcagatgactactttttcaggaatgactacttgatgggcccacaacttgcacagaagaaaaaaaatctccccaccagcctgcaccctagatgaaggccaatacccagcattagtcacagcttcattctaaaatacacagccacagctaggccgggtgcagtggctcacacctataatcccagaattctgggaggccgaggcggatggatcacttcaggtcataagttcgagaccagcctggccaacatgatgaaaccccatctctactaaaaatacaaaaattagctgggtgtggtggcatgctcctgtaatccctgctatttgggaggctgaggcaggagaatcacttgaacctgggaggcagaggttgcagtaagccaagaacccgccactgcactccagcctgggcgacacagtgagactctgtctagaaaaacaaaaactaaaacaaaaacaaaaaaaccacagctaggtcccagccaaaacatatgacccaggactgtgtaagaggggctgcaatcagctgggtgcagtggctcacacctgtaatcccagcactttgggaggccaaggcaggtggatcacctgaggttgggagttcgagatcagcctgaccaacatggagaaaccccgtctctactaaaaatacaaaaaattagccaggcatggtggcacttgcctgtaattccagctacttgagaggctgaggcaggagaatcgcttgaacccgggaggcggaggttgtggtgagcggagatcgtgccattgcactccagcctgggcaacaagagcgaaactccatctcaaaaaaaaaaaaaggggtggggggtgctgcaatcccatacttctgctcctcaatgtaaaggaattatgcaaactgctgacttacctcagctgaatccggaactgaggctggctaggcctcagcaatgcaacacagggcagcaagcagcagctcaaagtacacactggctgctgggcagcagagcaggttagcaacctggacgagagaacagacctgtggcgtggtgaccagcatccagacatcttgttcatggtgacaactgccagtgtcacctgaaaacgtggttctgatgttgacacgcagaacatgtggttctatgtggcagaaacatagtgagtgagtataaaaaggcttattacataattgaggtctcagggcaggactcacaagcagctgtgaaatggcttgacagcaaggaagattgcattaattcctactgtgaatggtgatgcaggaatcctgaaataaacaccagcaaaccataggaagcaacatattaaaagcattacataacatagccaagtgagatttattcttggaacataaaaatggttgaaaatatgaacactgatcattgtcatataccacattagcaaaatgatggaaaatgacaattatctcaattgatgccatatatgaaaaacccacatcattttgatggtgaaaaactggatcaggaaaaaaaggatgtatgcactaacaggttgttgttgttgctgttgttttttgagacggagttctcactctgttgtccaggctggagtgcagtgtcaccatctcagttcactgcagcctccacctcccagaggttcaggtgattctcctgtcccagcctcccaagtagctgggactacaggcagatgccaccgcacccagctaatttttgtatttttagtagagacggggtttcaccatgttggtcaggctggtctcaaactcctggactcaagtggtctgcccgcttggccgcccaaagtgctgagattacaggcgtgagctactgcgcccggccctaactagttttactctatgtgttaagggagatgctgtcagggaaatcaggcaagaaaatgaagtgaaagcaatctagattaaaaaatatacacacacagcccccacagcctcccagaccaacaagagatcataaccattttcactgtacacacaggtggacacacccagagacagacacataaactcacaaactcacagataaaaatggcccagagataccaacagatgcttgcagagacacacagaccccaggcctgccccctctactccaggtttctctccttcctgaggaataaccactatgatctactgtatatttttgcttattctcatgttctcttctagaatgtcaggttggaggagacagggatattagtgtagatttgttcattacaccaactagagaacctgttatatcaaggagattaatacttattgaatcggccaggtgtggtggctcatgcctgtaatcccagcactttgggaggtgggcggatcacctgaggtcaggagtttgagaccagcctggccaacatggtgaaaccccatctctacgaaaaatataaaaattagtcgggcatggtggtgcaatcccagcactttgggaggtgggtggatcacctgaggtcaggagtttgagaccagcctggccaacatgatgaaaccccatctctactaaaaatataaaaattagtcaggcgtggtggagtagtaatcccagctactccagaggctgaggcagaagaattgcttgaacccgggaggcagaggttgcagtgagccaagaccatgccattgcattccagcctgggcaacaagagcgaaactctgtctcaaaaaaacaaaacaaaacaaaaaaacacttattgaattgtaggactcaaacagacacacaaacaggttttacacaaacctcgccataagctcacatacacttaatcttcaaagactgaattgttctcacccacatcccatgtggcagagaggtgcttccggcccccaagcctctcacaaaaagtggctccttagcccatgctgatggggaagacattttacaatacttgagcatatagactctaagaagtgcttttctgtaaaagtagaaaatgggagttcaaggatgcaaaagggctggaaatggattgatgctgctgctccagcccttcaactgttataaattgtagatgattccagaaacatccctcatgacttgaccgtgtgtcagtttgcttttccactgagagcacaatgagggcagcaaaggcgtggatctcatggctcagctgcatgccctcctctgagctcttcctggtagctctcaccttcactaagggctcatctgccagcagacctcgccccagatggcctcacgggaccccaccatgctcaagccttgcaaggctgccccctgacccacatctgctgttggggtaggatggaggcctacaaaactcagactaaacatcttgaattgacagaaatatcacttctggtatccagggagagacaggaagttgttgtgaggttggatggtgagctggcttccctcattcctgccacatccctggcaggacactctgacttgctatccaggtaacagtgggcactgcctccaccaaaggaagggcctgacacctaccatggctgcacagctcagcaaaggaggaactcttcggtgctgtcaggacagtttcttgggagttcagtacaccttgcattctgggagtgacatgaagcgagtcggctccatggccggtgccgcctctctgatatagcggcttcccgtataccacaaggctggagttctgcagggtgggttctgttccacgaagcactaagtgctggccttggaggcaaggctacgaaaccagccctgcagcagcacacgtgacacgcactgaggagaaaccttgtcattgtcagtgcctaagccaggtggaatgtgccagaaaatctggggtgggcaaattagggaaggtaagaagttgatcgtgtcctgcagtctatggccatactaccctgaacgtgcctgatctcgtctgactgtgttctgtagctgggacatggtagggcatgtctctatgatgccacagttggttttgagacttctgtggtggttggtgcagagctggtggttatgggacagtggatcttgtatggtcaaggggcatgacacacattctgccacagcttcttcagccctcactttagagctacctgggttgtcacagaaaaatggtctagtgtgaacttttatttatttatttattttttttctctttttcttttttttttgagacagggtctgtctctgtcacccaggctggagtgcagaggtgtgatcttggctcactgcagcctccgcctcctgggttcaagtgattcttctgcctcagcctcatgagtagctgggataacaggcacgtgccatcacacctcgctagttttttgtatttttagcagagatggagtttcaccgcattagccaggatggtctcaatctcccgacctcatgagctgcccacctcgacctcccaaagtgctgggattacaggtatgagccaccgtgcccggccttagtgtgaacttttaaatgcatttaccaacaagaatccacagtgtgggtttggatgggaaacggagctggacatgacctccagacggccttggaataacatgatgttgacagccatgaattagggtgtccacaggcagatcccactggagaactgtgggatgtacctttgttttcagaaccacagcatccccaaagatctgacccaaggacactgatgaaaagttcaaaggcagattgtgggagccctctcaattctgtgcagtcacgtacgtaagctaagggctgggagtgtttcttaacttcagacggggttccaagaaaggcctgttgggacccaagtcctttctcctcagtccttcaatttgtcctaaggcagtggaaagggttgcatatgtacttgaagacatttccatattgcttacattcaagaagctgctcttaaatgtgtgcatggtttcatggtctcaaaatgaactaggatgcacaagaaactcagaaatgacagaaaagttaaatgaatatgaaactgaagagtttagattccacggatatttaaaaaccagtcaacttgaaatggatattcagattaaaaagataaaacataagactgataatcttatagcagaactggaaggtgcatcttcaaaatgtctgtatctggctgaaaacaatcaagttcttcaacaggaattattatctatgaaaacgatacaacagaaatgtaaagaatttgagaagaataaaaaggtgttggaacaagaagtgagaggagttagctagcttgcctcaggtaaacagcaagggaagggtttttggagagcccccgacccactggttagtgccttattcccacatataacaaggtctctgattggattaaaaaataataataattagcacagggagtcatgcctagagatatgcccacagctgcacagatagaacttttagcccactcagataaggaaacttgcacaaacctttagcccacttaaataaaggaacaaggcccaacatagaaatgccttagtcctttgtataattagtgggcttccaggaaatagcctctactccttttatgggcatatacctggtgggctctggtgggttctggtgggcacttcctttttttaaacattctttagcctctatgaatcatcacttcagcctctgattggtcccaggccaaggtcctgggccaggctgaatcatgctttgccaagacagccttcagactagtcagcacatttcttcccctttccagtctataaaaatcccagacccagcctcatagtgggcaacccatttgggctccactctctgctgcacagagctttctttttttgcttattaaacttttgctccaatctcacccttgtgtctgcattccttaatcttcttggaagtaagacaaataactccacatagtacctcagaaaacaaaaaactgctacactgtggtgcattggcaagcctgtaacagaagtagtaaatctaaaaagtcatatggaaatgaacgtgctatagaatatgtagagaagtttaaatgagagattgaagaaagagcaagacaagaaagagaaaaattagaagtccatctacagaacgaatgagataccagcagcagtgtgcaccaagcttctacagacaaagtgcgtcaaatgtttactctccatttttactacaaggccagtccaagagttaccttgtgttgaaaatcttaatagtgtaggtctcaacagaggacatattatgagagaaaacttaaggatccctacctcatacccagagacctcaaatagcagcatgaactactcaaccaagactcagccagattggatagaaaaaaataactacagaagtaaaaaatgctgttgctgaattggaaattagctctcatatggtttcttctgtagaatccactgaagaatgagtcacatctaaatcaatatgtcctttggaaagcataatgagaatatgttccagttttaaagaaaaatgttataatttataagattgtaaaattttattactgggctgtttacatgatactttctttcttattaaatataacctgacaatctttattaaatgaaaatatttttgtatcatcaacaacaacaaaagaactaggatgaagaatttcccacattcttaatatttatagggtttctctccagtatacattctcatgtgtgctcaaaaggctgtgtgaaggctttcccaaatgtcttacatttatagactttcaccccactctgactcctttcatatattcacactctagaggacagttggaagattttcccacttttattttttcttgagacagtgtctcattctgtcgcacaggctggaatgcagtggcgtgatctcagctcactgcaacctctgtctccaggttcaagtgattctcctgccttagcctcctgagtagctgggattagaggcatgcactaccatgcctggttcattttttggtaatttttagtagagatggggttacaccatgttgaccacgctggtctcgaatttctgacctcaaatgatctgcctgccttgcaccttggcctcccaaagtgctgggactataggcatgagccaacaagcttggccttttttaaaaaaacaaaaaacaaaaaacaaaacagatttcactgcagcacgagtcctgtctttgaaatgaattaggtcaactgaaggcttaatcacaatgtttacattcatactgtttctcaccagtgggaattctttcgtgctcaaaagaaactggaacaattaagggctttagaacaatgtttgtattcacacagcttctgtccagtatgaactcttttgtgtattcagaaggagctggaacaaccgaaggcttcagaatgttgcttatattcttagactttctctcccatatgagtcctttcatgcagtcgaaagtgactggaagaaatgaaggcttttccacattgtttgcattcataaggtttctctccagtgtgagacctttcatgaattcgaacagaacttgaaaatctgaaggctttcccacattgtttacatcgatagggtttctctcccgtgtgagttctctcatgcattcgaaatttactggaagaaatgaaggcttttccacattgtttacattgatacggtttctctccagtgtgagtcctttcatgcaatcgaatttgactggaacgaaggaaggccttaccacattgcttacactcaaaaggcttatttccagtgtgaattttttcatgttctcgaagggaacttgaaaaactgaaggttttaccgcatagtttacattcatagggtttctctccagtgtgtgttctttcatgcagtcgaaaggaactggaacgaatgaaaacttttccacactgtttacattcatagggtttctctccagtgtgtgacctttcatgaattcgaaaataacttgaacacctgaaggctttcccacactgtttacattcatagggtttctctgcattgtgagtcctttcatgtctttgaagggaacttgaaaaactgaaggttttaccacattgtttacattcatagggtttctctccagtgtgagttgtttcgtgttctcgaagggaacttgaaaaactgaaggttttatgacactgtttacactcataaggtttctctccagtatgagttctttcatgcaatcgaagagaaatggaccaactgaatgatttgccacatcgtttacattcatatggtttttctccaatatgagttctttcatgcactcgacaggaattagaagagttgaaggctttcccacattctttacatttataaggtcgagccccagtgtgtattattacatgtgctcgaaagcttgcagaataaaagaaggcttttccacattctttacattcatagggtttctctccactatgagtccttttatgccttcgaaaagaactgagaaaactgaaggctttaccacattctttacatttgtagggtttttctccagtgtgagttctttcatgagttcgaaagtatgtgggacaactgaaagccttaccacattgcttacattcatagggtttctctccagtgtgagtccttttgtgtctttgaaaagattggtaacatataaaggctttcccacactgtttacattcatagggtttctttccagtatgagcatgtttttgaaaagactggtaatatataaaggtttttccacattgcttacattcatagggtttctgtccagcatgagtcctttcatgtctttgaaatggctggtaatatataaaggctttcccacactgtttacattcatagggcttcactccagtgtgagttctttcatgtttgcgaaagcagtggtgataactgaaggttttcccaactgctttacatttacatggttgcttttcatattcctgatactcatttggtttctgtccagtgtgagatctcatgtgcctattaagggacgaatgatgaatgaagtctcttccacaaaagctgcattcatgtggttttgctccagtaaaagtttccttgttgatattaacatttggcatctggctagtggtttctccacatttgctacctcttctactttcacagagtctctcaaccatatgacatctgtaaaaaatgaatagcacattattagtggctttttaattattttgtatttattagtaggtatgagaattacattttaaccattttcagaaaaagtataggatatctgccctgtctgaattgttttaaagttaatatattcaatgctctggaagaagactcaaccatagttatgatcaaaacagtcaatttttttgttgttgttgtttaaataagagatggagtctcattctctcacccaggctggagtacagtggcatgatcacagctcactgaagccttgaattcctgggctcaaccaatcctcccatctcagcctcctgagcaggtgggactagagagtgccaccatgcctggctaattttttttttttttccaagatggagtcttgctctgttgcccaggctggagtacagtggcacgatctaggctcactgcagcttctgcctcctgggttccagcaattttcctgcctcagcctcctgggtagctgggattataggagcacaccaccacagctggctaatttttgtatttttagtagagatggggttttgccatgttggccaggctggtcttgaactcctgacctcagatgatctgcctgccttggcctcccaaagtgctaggattacaggcatgagccactgtgccaggcctttttttttttttttccccagatgaggtcttgctatattacccaggctggtcttgaattccaggcctcaagtgatcctcctacctcagcctcccaaactgctgggattacctacatgaactattgtgcctggccaaaataataatatttataaaaggggtttctaaatgctatttcgaagtgatttatttttcacatcctgaacatctatgatgtttttaagaaaacattttcagtgaaagttttctaggaataaataaatttgaagctgtgcttaattgttttgcttgctttcttttgaaattcccccacgggccactatttttctgtggatgcaactcaccttcgatttttcccctggtttctgtggtcatcttcaatgtcctggtcttcccacttttttcctaaaatgcatacccagaaagaccattaaaaattattagaaattatagaaaattgttacagtctagtttcatgattagctgtgactgtctgattcaatcactgaaagattccctttccacatttcaaatcttggaacacagctgttgagcaagaaacacttgttctgtgttctatatttaactgaggaaagaaatgttgatatccttacctagacaaaccaggtttttgaaggtctcctgcatcacatcttcatagagctttttctgtgaagaatccagcaaagcccactcctccagggtgaagttcacggccacatcctcaaaggagactgagtcctgaaacattccacatatgtttacagaggatgggtaagactggcagtactggggatctatacttgatttgtaagaagttcccatacaattctgtgttctccaaacatttggtgtatgactcagctgtcagaactacgactgtccacactgacttcctcataaaattcatgctgtcatgaacacacagaaattacttctatttttttctttttcctttttctttttcttttttttttttttttgagacagagtcttgctttattgcccaggctggagttcagtggtgcgatcttggctcactgcaacctctgcctctggagctcaaatgattctcgtgccccagcctcctaagtagctgggactacaggtgtgtaccatacctatctaattttttgtatttttagtagagacggggtttcaccatgttggccaggctggtctcgaactcctgagctcaggcaatttgcccgcctcggcctcccaaagtgctaggattacaggcgtgagccactgtgcctggtcaattacttctaaatttttactgtgatcatgtgaaaccttattgttctctaaaggtggactcaagctcacactggaaaagtaagagaaatgctatacaaatgaaacaaattttaagaccattaatcccttgtgagaaaaactcatttcctaccttattacgtaccatatcactcagcatttcattacgcatggaatcaatctggataaggttttaataaataaatacaccttcaagaactgtaggcttttcttttattcccatcaacaaacgagaggccaggaggcctgtggaaagctaaattgtcacaaggagctgctggccatgtcctgaaggactccaggccactactgcagtggagtaattaaggaatcagagagattgaggggttgaggaggaattatttaattatttaggtgcacccacccagttggattaacatccaaagaactgagccccaaacagagtcaagctaccttttaaccatttcgtggggtggggaggagatttgtgcagggggaagtgtattacagaagcgagaaacaaagacagttattcaattaaaacacgcattacattacttcttacttttcaaggaacgacaacatgttttacgacttgagattatctgtttagtgaccttgcagctgcacagctagagaaacagtcttcacaatgcctgggaaagggagagataaggctcactagctacagaaaaataggcagtcaatttttaaaggacttcagatctttctcttcctcagggggaactggtttttcttacatacaactgagtttttgcttatacatttttaaaatttcttttaattcctgttccactataagtactcaaatccagctggctgaatgaaaatatttctttgcagaagtattaatttcaacttgtttgtgtaatatttatcacaggctcagttcttcctttttctctctctcacatttcatggatctaggagattactaggaagttagagctcaggcctgaggaggaacgtatggcaacttacacctctacaaaatttgtataccaggagagggtttattacgcgtttacttgagactttgggaagactcgggtaggctggctaggggttttcactgaggttagggagtgggctagtgtgggagttcaagcatacaagcaggggctaatgtggattgaatgtctcaccagcaccaaatgagggtgacccaggctttcttcctaccacatctggatgtagggtacatagtagaaaaggaggaatgagattttattttatttattttatttcatttgttttgagaccgagtttcgctgttgcccaggttggagtgctgtagcgtgatctcggctcactgcaaccttcgcctcccaggttcaagcgattcttgtgcctcagcctcctgaatagctgggattacagatgtgcaccaccacacccgtctaatttttgtgtttttagtagagacagggttttgccatgttggccaggctgggcttgaactcctgggctcaagcgatctgcctgcctccgcctcccaaagtgctgggattataggtgtgagtccccatgcctggcaataatgagattttaaagctatcatccatcaaacatcacaaaaaaatgaagtcagagacttccaatttctggtctcacaagtaaggaacgtagaaattgtcaatcccagccgtgcaagtaaaaaataaacatcaaatcaattacccttcttggatccattaaagaattgagggtcataaggcaaagttttctctctaaaatttgagagatgaataggaaaagtaacagttttgtaatattcccagaacataatgttcttcttaagaagacctgttctcaaaaaattccatttcaacaaaagcccaacctactatgattttaccaaagcctatgtgacctgggggcagggacacagaagcatgtgtgaaggtgaaccgttttttgtcttcccaacaccaatacaaggtgtcttttccaacgccattctccaaatctctgacatcgactgtgccctaaaatttaattcaattctaagtacccagaattagtcagactccacaggttaaggactcagtcccacaagactgcccccatgtcagatgcaagccacacggtagggtgcccaggccacccatgcttctacacgccaactacaaatctggagttcccacaccaccctttatagttcagtaattcactagggcctccctcagaagtcaggagagtgatatacttagcatcaccggtttaattacaaaacatacaactcaggaacagccaagtggaagaggcccattggtcggtatgcagagcaggtgggatgtttccatgcattccctgggtgtgccatcctcacagcacctcaatatgttcaccaacatggaagttctcagaaccccaatatttatgaaggtcccaacacacagatatgattgattaaatcattacacactaatgattaattcaatctccagctcctcttttctcttgtgaggctgggggctagggctgaaagttcaagggcaggtctttctggtcaccaatcctaatcctaaagtcatctaggatctcctaagagtgctgctttgcaaacaaggaggatcctttcacccttctcacttgtgaaattcaagggatttaggagctctgtgctaggaatcacacacaaagactaagtatctttcttatcatatcacaaaacatcacagctcgggcacaggctcactaaaagactgagatcaaatcataggactataacatgtttcccttccacctacaccttaccactattgtcattagggtttctgtttaaaaacaggtgactgcaatgaaagaatattgcactgtttctttctgcatgtttcagactttatttaacaagtgtctagagaagcccaaagatgacaggagagagaaaagcaaggacatcaaaggaaattttaacctctgacatctacggctactgaaaacagtaaacagagacaaaacccagtaggataaacctaaaacctcacactcaaggcctatttacctcagtttctttttcccagtacatcttgtcgagttttcaacaaaaattatacgaaatacaaaaaggttttaagaacagaattagaagacagaggtcaagcaccagaaccagattaggtatagaagagatgttggaattgtcagatcagaaatttaaaccaaatatgattaatatactaagggttctcatggaaatgttgaacaatatgaaagaaaaaatagacaatttaagcatatatatagaaattctaacaaagaatcaaaaggtaacgaaggacataaaatacactgcaacagaaatgaagaacagccttacaggttcatcaatacagtggaaatgtctgaagagatgatgagtgatcttgaagaactgtcagtataacccgtcaaactgaaaaggagaaacaagacatcagaagatccaaaaactgtcagaaaattacaaaaagtggaacatacacataatagtactaactaaagacaagaaagaaacagaagaaataactgaagcaataatgactgataatttcccaaaattaatgttatacatgaaaggaaatatccaggaatgccaagcaacataaatacccccaaatccacacctgggtgtatcatattcaaggagaaaattaaaagacaaagaaaaactttgaaagaagttacagggggaacaaacaacatctttgttataaaaacataaaagaattaagtcagactcttttttttgagacattgtcacactctgttgcccaggctggagtgcagtgggacgatcctggcccactgcaacctccacttcctgggttcaagcaattctcctgcctcagcctccgagtagctgagattacaggtacgcaccaccatgtccagctaattttttgtattttcagtagagatggggttttgccatgttggccaggtgggtgtcaaactcctggccccaagtgatctgcccacctcgacctcccaaagggctgggattacagacgtgagccaccaggaccagcccaagactctttacagaaagtgaaagcaagaagagactggagtgaaatgtttaaaacattataagacaaaacccccaaccacatagaattctgtatagagcaagaatatccctcaaaatggaagagaaatgaaagctttatgagataagaaaagataatctgtcactagcgtacctgccttgaaagaactgttaaaaaattccctacaaaaaagaaaaacgataaagaagggtattagagaaaaaataaatacaagtaaaatacaatctcttttttgtaatctgacagatgagtttgtccaaaacactaacaggaacaatatatttggtaagtccagcttatggataaatgatacgtatggtagcaatgttacaaaggacaggaaaggaggaattgggaatactttttcatgaggtacttgcacaaccagtgaggtagtacagtgttctttacaagaggacttgggttacttgtaagcatgtactacaaactcaaaggcaatgagtaaaacttaaaaaacaacaaaaaactataattgatgtgctaagtggggagaaaaatggcatcaagtaaaatgcttaatgaaagcagataaggtagaaaaagaatagaagatgggaaaggaagaacaacaacaaatagaaaaacataaaaagaaaaagggagacattaatacaactaaatcaataacatgttaaacatcaatggtctaaatacaacaaatggtggacagatactgtcaataatggatcaaatatacggtgttgaaaagaaacacattttaaatatacagttatagatacattaaaaataaaggaatgaagaaagatatgccatgctaacactaagaaaaagaaaagtaacacagctatgttcatttcagacaaagctgacttcacatcctggaaatctcagtgacacaggggcattatgtaataacaaagtgatcaattcaccaagaagacaaggcaatccttagtgtgtatgtgcataaaaacagagtggcaaaataatgaggcaaaactgatggaacggcagggagaactgcatggagccatgaagtatagctggagacttcaatacctgtctatcagcaatagcagatccagcaggcagaaaatgaggaaggacattgttgaactgaacagtaccatcaaacaactggactgaacggaaaatcaaaacacttagaccagcaatagcaggatatacattcttctcaagttcacatggaacattcaccaaggtagcccacattctggaacataaaacatatcttttttttttttttttgagatggagtctcgctcttgttgcccaggctggagtgcaatgacacaacctcgggtcactgcaacctctgcttcctgggttcaagtaattctcctgcctcagctttccgagtaacttaaataacaggcgcctgccaccatgcctggctaatttttttgtatttttagtagagacggggtttcgccatgttggccaggctggtctcaaggtcctgacctcaagtgatctgtccgcctcggcctcccaaagtgctgggattacaggcatgagccaccatgccctgccaggaaattgggcagctcaattttctaagagctcctaaaataattggaagcccctaaaattaaaaataatcagggaactcattttacatcaaggactacacaagtgacatcagatcaatgagatacacaatggaatttccacctaccctataatcccacagcagcaagatgtatatagaaattaaccaggctactaaaaagagaattgaaaaccctagacaaagtgagcacatcccaagaagctcttaacccggcatgttttaatttaaataaaagagaaagcattcataagaacaacctcctactcttactttatttatttattgatttttttgagacagagtcttgctctgtcactcaggttggagcgcagtggcgcgatcttggctcactgcaacctccacctcccgggttcaagtgatcctcctgcctcagtctctcaagtagctaggactataggcacgcaccaccatgcccggctaatttttgtatttttagtagagacggggtttcaccatgttagtcaggctggtcttgaactcctgacctcatgatctgcccgccttggcctcccaaagtgctaggattacaggcatgagccaccacccccggcccttcctactcttactttaatcaaccaaccttaatagtcacaaaggataaggaagacaatgatacaaagattataccttacaaggggagcatttgactaaatgccaactctatctcccagcaggacatcttggcccatggatatgaaaatacttattgactacaggtaaaagaggagacttagaattatgcaaaatctccaacttttctccaaattctcactagacctagatttgttacaccttttacaacagtggcactacactgttttcttcaagtcactgattgcatcaatatttccataagaataattgaaggtatacttcaatccagttttacttgccactcacctcgtatttttaacttcaacatcacctgtagccatcactggaataactcgtttacttgcttaagaacaacaacctgggcttggtgtggtggctcatgcctgtaatcctagcactttgggaggccgaggtgggtggatcacctgaggtcaggagttcaagaccagcctgatcaacatggtgaaaccctgtctctactaaaaaatacaaaaattagccaggtatggtggcagccacctgtaatcccacctactagggaggtagaggcaggagaattgcttgaacccaggaggcagagtatgcagtgagccaacattgcgccattgcactccagcctgggtgacagagcaagactcagtctcaaaaaaaaaaaaaaaaaagaacaacctggctacaaatttgtgtagcttctcagttggtcttaccgcctttctcattcacctctgctagtcatcagagtgactttactgtcttgttattacttaaattccaaccacataaaccagggtaacacaagcatacacaccactgcagacaaatgacaaattacaccatctgcttgccaagcacagtatctgattaataatttgcagactgacagcaacagtgcactcccagcatggagacttagtttctccaagatcacctttagcctttctaagatctcctatgtctcaccttattctacatatggctagccagttttcccaacaccatttattaaacagggaatcctttccccatttcttgtttttgtcaggtttgtcaaagatcagggtcgtagatgtgtggtattatttctgagtgctccgttctgttccactggtctgtatctctgttttggtaccagtaccatgctgttttggttgctgtagccttgtagtatagtttgaagtcaggtagcgtgatgcctccagctttgttcttttggcttaggattgtctttgctatatgggctcttttttggttccatatgaactttaaagtagttttttccaattctgtgaagaaagtcattggtagcttgatggggatggcattgaatctataaattaccttcggcagtatggccattttcactatattgattcttcctatccatgagcatggaatgttcttccatttgtttgtgtccccttttatttcattgagcagtggtttgtagttctccttgaatagttctccttgaagaggtccttcacatcccttgtaagttggattcctaggtattttattctctttgtagcaattgtgaatgggagttcactcatgatttggctctcttttgcctgatattggtatataggaatgcttgtgatttttgcacattgattttgtatcctgagactttgctgaagttgcttatcagcttaaggagattttgggctgagacgatgggttttctaaacataaaatctgcaaacagggacaatttgacttcctcttttcctaattgaataccctttatttctttctcctgcctgattgccctggccagaacttccaacactatattgaataggagtggtgagagagggcatccctgtcttgtgccagttttcaaagggaatgcttccagtttatgcccattcagtatgatattggctgtgggtttgtcatagatagctcttattattttgagatacatccaatcaatacctagtttattgggagtttttagcatgaaggaagggctgttgaattttgttgaaggccttttctgcatctattgagataatcatgtggtttttgtctttggttctgtttatatgatggattacatttattgatttgtgtatgttgaaccagccttgcatcccagggatgaagccaacttgatcatggtggataagctttttgatgtgctgctggattcagtttgccagtattttatttaggatttttgattcaatattcgtcagggatattggtctaaaattctcttttttttgttgtgtttctgccaggctttggtatcaggatgatgctggcctcataaaatgagttagggaggattccctctttttctattaattggaatagtttcagaaggaatggtaccagctactctttgtacctctggtagaatctggctgtgaatccatctggtcctgggctttttttggttggtacgctactaactgttgcttcaatttcagagcctgttattggtctattcagggattcaacttcttcctggtttagtcttgggagggtgtatgtccaggaatttatccatttcttctagattttctagtttatttgcgtagaggtgtttatactattctctgatggtagtttgtatttctgtgggatcagtggtgatatcccctttatcattttttattgcatctatttgattcttctctcttttattctttattagtcttgctagcagtctatcaattttgttgatctttttgaaaaaccagctcctggattcattgattttttgaagagttttttgtgtctctatctccttcagttctgctctgatcttagttatttcttgctttctgctagcttttgaatgtgtttgctcttgcttctctagttcttttaattgtgatgttagggtgtcaattttagatctttcctgctttctcttgtgggcatttcgtgctataaatttccctctacacgctgctttaaatgtgtcccagagattctggtatgttttgtctttgttctcactggtttcaaagaacatgtttatttctgccttcatttcgttatgcacccaatagtcattcaggagcaggttgttcagtttcgatgcagttgagtggttttgagttagtttcttaatcctgagttctagtttgattgcactgtggtctgagagacagtttgttataatttctgttcttttacatttgctgaggagtgctttacttccaactatgtggtcaattttggaataagtgcgatgtgatgctgagaagaatgtacattctgttgatttggggtggagagttctgtagatgtctattaggtctgcttggtgcagagctgagttcaattcctagatatcttgttaactttctgtcttgttgatctgtctaatgttgacagtggggtgttaaagtctcccattattattgtgtgggagtctaagtctctttgtaggtctctaagggcttgctttatgaatctgggtgctcctgtattgggtgcatatatatttaggatagttagctcttcttgttgaattgatccctttaccattatgtaatggccttctttgtctcttttgatctttgttggtttaaagtctgttttatcagagactaggattgcaacccctacttttgtttgttttccatttggttggtagatcttcctttgtccctttatcttgagcctatgtgtgtctctgcacgtgagatgggtctcctgaatacagcacactgatgggtgttgactctttatccaatttgccagtctgtgtcttttaattggagcatttaccccacttacatttaaggttaatattatgtgtgaatttgatcctgtcattatgatgttagctagttattttgcttgttagttgatgcagtttcttcctagcatcaacggtctttacaatttggcatgtttttgcagtggctggtaccagttgttcccttccatgtttagtgcttccctcaggagctcttttagggcaggcctggtggtgacaaaatctctcagcatttgtttgtctgtaaaggattttatttctccttcacttatgaagcttagtttggctggatatgaaattctgggttgaaaattcttttctttaagaatgttgaatattggcccccactctcttctggcttgtagtttctgccgagagatttgctgttagtctgatgggcttccctctgtggggaacaagacctttctctctggctgcccttaacatttttcccttcatttcaactttggtgaatctgacaattatgtatcttggagttgctcttctcgaggagtatctttgtggcattctctgtatttcctgaatttgaatgttggcctgccttgctaggttggggaagttctcctggataatatcctgaagagtgttttccaacttggttccattctccccgtcactttcaggtataccaatcagatgtagatttgtattttcacatagtcccaaatttcttggaggctttgttaatttctttttactctttttttctctaaagttctcttctcacttcatttcattcatttgatcttcaatcactgataccctttctcccacttgatgaaatcagctactgaagcttgtgcatgcatcaagtagttctcgtgccacggttttcagctccatcaggtcatttaaggtcttctccacactgtttattctagttagccattcgtctaatcttttttcaaggtttttagcttctttgcgatgggtctgaacatcctcctttagctcagagaagtttgttattaccagtcatctgaagccttcttctctcaactcatcaaagtaattctctccgtccagctttgttccattgctggcaaagagctgcattcctttggaggagaagaggtgctctgatttttagaattttcagcttttctgctctggtttcttcccatctttgtggttttatctacctctggtctttgatgatggtgacgtacaaatggggttttggtgtggatgtcctttctgtttgttagttttcctcctaacagtcaggaccctcagctgcaggttggttggagtttgctggaggtccactccagaccatttgcctggatatcaccagcggaggctgcagaacagcaaatattgcagaacggcaaatgttgctgcctgatccttcctcttgaagcttcgtctcagaggggcacccggctgtatgaggtgtcagttggcccctattgggaggtgtctcccagttaggctactcaggggtcagggacccatttgaggaggcagtctgtccgttctcagatctcaaaatccatgctgggagaaccactactctcttcaaagctgtcagacagggacatttaagtctgcagaagtttctgctgccttttgttcagctatgccctgcccccagaggtggagtctacagaggcaggcaggcctccttgagctgtggtgagctccacccagttcgagcttcccagccgctttgtttacctactcaagcctcagcaatgacggacgccccttccccagccttgctgccgacttgcagtttgatctcagactgctgtgctagcagtgaaagaggctccgtgggtgtgggaccctccgagccaggcatgggatataatctcctggtgtgtcatttgctaagactgttggaaaagtgcagtattagggtggaagtgtcccgattttccagataccatctttcacggcttcccttgactaggaaagggaattccccgaccccttgcacttcccaagtgaggcaatgccccgccctgctccatgggctgcacccactgtctgccaagccccagtgagatgaacctggtacctcagttggaaatgcagaaatcacccatcttctgcattgctcatgcagggagctgtagactggagctgttcctatttggccatcttggagcctcaaggccgagtactgttatatcttagttgttacagtgttatgtttaatcagatacatattacatatccaataattaatataaaacataggattgacacaaatagactaaaatagttaatttttttctttttttgtagtgatggggtctccctatgttgctggtctcaagtcatcctcccgccttgaccttccgaagtgctgggattataggtgtgaggcaatgcacgcagcctaaaatattttagaatataaaagggatataacagatacaacaactactactactactacttctgttcctaccactcctactaaagccaccgtaaaaattcctgagcctcgaatacatagatatccaacaatgccaactcatacctaaaatcacacgattaccagaacacactccacatgtacttgatgaaaatatattcttttttgaacaactgccagaaaaatcaagggactaataatatgtagtctcagaccatttgaaatgaatgcctaaagagtttctacacacacatccaatcaatgcatctttatagacgcttggcatgtattcccaaacaccccttagaagaccacataaatgcgactcaaccaatgtatgtagctataatcaagcattcaataacatctcaaaccaatggacagcacacataataatagaaaaatgctaccagaaacagacatgccaatccaaacagatcattacccagcctggccatcatggtgaaactccgtctctactaaaaatacaaaaattagctggcatggtggctcatgcctataatcccagccactcgggaggctgaggcaggagaatcgcttgaacctgggatgtggaggttgcagtgagccaagatcgcaccattgcactccagcctgggcaacacagtgagactcttgtctcaaacaaaacaaaacaaaacaaacaaaaaaacacaacaacaaaacaaaacagatcattagataaaagcaatctgtcagaccaaacaccaatcccagtaccacagtcaaaccatatactggggccaggtgcagaggctcatgcctgtaatcccagcactttgagaggccgtggtgggtggatcacaaggtcaggagttcaagaccagcctggccaacatggtgaaatcccgactctaataaaaatacaaaaagtagccaggcatggtggcaggcacctgtaatcccagctactcaggaggctgaggcaggagaatcacttgaaactggaaggcagaggttgcagtgagccaagatcgagccactgcactccagactgtgcgaaagtgcgaaactccgtctcaaaaaaaaaaaaaaaaaaaaacatatactggaagaactaacatgacaagcttaaatatgatatatactcctatgagtcatttgttgatacttgatgtgaattctggtaccaatctgaactcgaaggaagtaaagattatgattacaaagcagatctaaaagatggtacaacaccagacacagctatcacaccaatcattcatattacatatacccaactttcagacctccacgggaaaaaataccaatgccactgggatacccattggactgtgatatataatagaagaggataagacatactataatgattctctaactttccacttttgagaaattttgccttccaaccttgttataattatgccaaaagtcaaacttatttgacagaaccacaattctttgacagaactaaaaaaatcctcatagtagaattagattggaaacaaagattacacccagtaatcttttccccccgacaagacggagtcttgctctgttgcccaggctggagtacagtggcgtgatctcagctcgccgcaacctccgcctcccaggttcaagcgattctcctgcctcagcctcccaagtagctgggattaaaggcacccaccaccacacccagctaatttttgtattttttagtagagacagtgttttaccatgttggccaggctggtctggaactcctaacctcgtgatccacccaccttggcctcccaaagtgctgggattacaggtgtgagccattgtgcctggcccacccaataatcttaactgatcctcatcactttacacacacaacttttttttttttttttgaggcagtcttcctctgtcatccaggctggagtgcaatggcgcaatctcagctcgctgcaacctcagcctcctgggttcaagcaattctcctgcctcagcctcccgagtagctggaattataggcgccagcccccacatccagctaattttttgtattttcaggagagacaaagtttcaccacgttggccaggctggtctcgaactcctgactcaggtgattcactcatctcggtttctcaaagtgctgggattacaggcatgagccaccacacctgggcctacacacacgacttctgaaacacatgctaaaacaacagaagattatgtagacagagttgtcctaaatatacttgttttcaagggtaccaattaaacaccacaactgagaaacttataaaaaaaaatgtacagaatcacccaatgagacacatattttaagggatgaccaacattaatatgcttccaccttaacatatattagagctgtatttcatcatcctacaggtgaaaaaccttaccctcacccatttttcaatataatttactaaaatggctacatatacctagaccgataagctttacaaatcaaactgaatgaacagacacagcaccattcagaatgtgacataattcaacacatactaaattcacattcgtggcaagcttggctacaatatatgcaaactacctttatttatttagttagttttttttgagacagagtctcaaggctggagtgcagtggcattagctcactgcaacctctgcctcctgggttcaagcaattctaattctcctgcctcaacctcctgagtagctgagattacaggtgtgtgccaccaggctcggctaatttttttttgtatttttagtagagatggatttcactatgttggtcagggtggtcttgaactccttacctcaggtgatccgcccgcctcggcctcccaaagtgctgggattacaggcgtgacccaccgtgcccagcccgcagttttatttaagggcagggtttgattttaaacacaaacttaactcccacatgtcaactaccactttcatactctcctctatctcacagacaatgaaatacaatcaatgatgactcatataaatgacctcacagaatatcaaaaggtgtttaattacagtatcaattacaaggtaggcatcttaaaaaccaatctatttacattaataaacttgacggtgaaagactgactgcaaacccaatgtactaagcgaagtacttatactaactcagacttggaataacataagaaatccaatacaggccgggcgcagtggctcatgcctgtaatcccagcactttgggaagctgaggcgggcggatcacctgaggttgggagttcgagaccagcttgattaacatggagaaaccctgtctctactaaaaatacaaaattagctgggcgtggtggcgcatgcctgtaatcccagctactagggaggctgaggaaggagaatcgcttgaacctggaaggcggaggttgcggtgagccgagatcaccccattgcactccagcctgggcaacaagagtgaaactccatctcaaaagaagaaagaaaatataaaaaaagaaacccaatacaatcaggaaaattatttacaaaacactggcataaagcagctgtagttcaactggatacatccaaaccatcaggatgtgaagattcaaggtcacgtatattaagcctacttgaattaagatgaggagactcacaactagcttttgacccaagtacacagacagataaaagatataatctacaaataaccaccttagaaaaaccattatttattgattattttatacaaaaataattagtattccaattctgaaaaactatatactacacctttcaggatagggtacccaaactagatatggtacccaaactgacatatcagcatcaaaagaatacccacaatcagccaggcgcggtggctcatgcctgtaatcccagcactttgggaggttgaggcaggcagaccacctgaggtcaggagttcaagaccagcctggccaacatggtgaaaccccatctctgctaaaaaataaaagaattagccgggtgtggtggtgggtgcctgtaatcccagctatgcaggaggctgaagcaggagaactgcttgaaccagggaggcagaggttgcagtgagctgtgatcatgccgttgcactccagcctgggcgacagagtgagattccatctcaaaaaaaagaaaaaaaacaacaacaaaactacccacaatgactctagacttaggaaccttccactggttaattgctcagagaaaaacacactgacctattacaaccacacgaggaaagaaaaaatcacaacatacacttacaatcagaatgtatcaaagtggtgtgtgtcataaacatcactctcacaaacacctcaaagcttaccacttagccgggcgcggtggctcacgcctgtaatcccagcactttgggaggccaaggcgggcagatcacaaggtcaggagatcgagaccatcctggctaacacggtgaaaccccgtctctactaaaaatacaaaaaaattagctgggcgtggtggcgggcgcctgtagtcccagctactgggaaggctgaggcagaatggcttgaacctgggaggcggagcttgcagtgagctggagatcgcgccactgcactccatcccgggcgacagagcgagactccgtcacacacaaaaaaaaatgcttaccacttatatacggaacaaatgacatacagagattttgcatcatcatggcactccaacataggcgaaatctcttgggtagaaaccacacagataaacacacacaaacaagaaaatttaaaagaacctgaacaagctcacaattaattccatccagaaaccaaagaaactaaaaatcgcacacattcacgcaagggaacaaaattacccagagcgaagggaaactggaattaagggtggctagaattaatatttgatcaaggagtccaaagggaagaaacacaaactttctgatcagttaagataaggagtccccttccccgcagttcgaaaagaaagcccacattcagaaggtcaaaaacacccccagacttgagtgctgggagcactagagggggtcagtccctggtgatgagggcaggggcgtttgaacagccacaggaacctgaccccggcagcaaggacctagccaggcttcggttctcacaagtgaggaaacgcacccgtggattcatcgtaaggtttccaaccaagtggtttcttaaacgcacaaaccccacagaccgagatgggatctccccaggaccctcccgctgtcaccgaacaatccggggagacgcggggctgcgggcgcagagctgcccatagagggctccaggaccgggggccgaggtcgccccgcggggacgggacaggacgctggggctcccggctgcgggtccagctcccacagagaggaccgagggccgaactgcgcccgcggtggcccccgggtctgcaaaccccggagttgactgcaaggaggtccccggcctcggccacagacggttccaaccagaaacctcccctcggacactggccccgcacactcaccatttcccagcgtccgggaagtcacggtgtcctccctacggatctgtcagtacctgcaggtcacggcgcgacaaaggatgcgctagagccaccttcggccttcaggagcaggtgaaacgcaatcttcccatgggccaggaatggcgacgtccgcactgcgcaggcccagcgtggcgccgctcacatcttttcagctgaggtcctgattggacagatccaatggccccgcctctttatcactgagtgacagcggagcaggaaggggcgtggttgagctggcctggcttcagtccggcttgtccccgccaggacgtttgcgtttaaaccgaatgtgttctttgcctcccatccattttaagtgttctcttcagtactgttaaatacattcacattgtgaagccaatttccagaattgttttcatcttgcaacactgaaatctgtctcgttgcacaactccccgtgcacctccttccctcagggtcttttgcaacctccattccattgtctgagttcgtgaatttgactgtgggaatctcatgtaaatggcgtcataaagtatttgtcctttcctgacgtgcttatttcacttagcataatgtcctcgagcttcaccttgtagtatgtgttaggatttatttcttctttttttttttttttttgagacggagtctcgctctgtcgcccaggctggagtgcagtggcgcatctcggctcactgcaagctccgcctcccgggttcacgccattctcctgcctcagcctcacgagtagctgggaatacaggcgcccgccaccacgcccggctaattttttgtatttttttagtagagacggggtttcactgtgttagtcaggatggtctcgatctcctgacctcgtgatctgccggcctcggcctcccaaagcgttgggattacaggcgtgagccaccacgcccggcctcttcttcttttttttttttttaagagacagggttttgctctgtagcccaggctgaagtgcagtggtgtgatcattgctcactgcaggcttcaactcctggattcaagcaagcctccaacctgagcctcctaagtatctgggactacacgcacgcactaccaggcctggctaattgttttaattttaattttaatttttggtagagatgtgtgtctccttctgttgcccaggctggtctcgaactcctaggttcaagcaatcctcctgcctcgacctctcaaagtgctgggattacaggtgtgagccactgccaccggccaatttacttctttttttttcctttggagatggagtctcgctctcgttgcccaggctggagtgcagtggcgctcagccaccgcaacctctgcctcccaggttcaagtgattctcctgactcagcttcctgagtagccaggattacaggcgcccaccactactcccggctgatttttgtattgtagtagagatagagtttcaccatgttggccaggctggtctcgaacgcctgacctcaggtgatctgccctctttggcctcccaaagtgctgggggtgtgagccacctcgcctgtccccaatttacttctttttaatgctttatttaaacattttttaaagagttcctaaattagtcagttcctaaatctacatacaatagaatagaattgtattctattgtatgtagatatcaaatttctggatttttctggatctatttatctttctttctttttttttttttgagacagtcttgctctgttgctcagactggagtgcaatggcgtgatctcggctcactgcactccacctcctgggctcaagcaatccttgtgcctcagcctcctgagtagctggggttacaggcatgtgccactatgcccagctaatttttgtaattttagcagagatggggtttcgccatgttgcccaggctggtctcaaactcctggggtcaagagatctgcccaccttggcctcccaaagtgctgggattaccgcatgagccacctcgcccggccttatttatcctttcctggacacctaggttgcttctgcctttggctatggtaaataatatgtctatgaacatgggtgaacaaatatgtgggttgctgctttcagttttttagggtatgctcagaagcagacttcctggatcatatgattactttgtatttattatttatttaaggaatggccatactctttttcctagcagccatagcattttccattcccaacaacagtgcacaaggatcccaaaaggtgttctcacttttttggtggtgtcctttgaaatacaaaagttatcaattttgctgggcatggtggttcatgcttgtaatcccagtactttgggaggctgaggcacgaggatcgcttgaggccagaagtttgagaccagcccaggccaacattccaagaccctgtctctacaaaaaataaaacaattagttgagtgtggtggtgcacacctgtagtcccagctactcaggaggcagaggcaggagaatcactgggggctgggaggttgaggctgcagtgagccatgattgtgccactgcactccagcctgcgtgacagagcaagaccctgtctcacacacacacacaaaagattcattctatactaggcattgatatgttatttattgttttattgttttattttttgagaagggtcacactctgagatcacgcctgagctgaaacttagagtgaggttagccaactcttagagtgaggtaaggctagctctccaactttagcccttttccctgtttgcctttctctctgccattactgaactgctggtcatgccctcctcaccaatttctctctctcccttttttttttttttcttttttgacagagtctcgctctgttgcccaggctggagtgcagtggtgcgatcttggctcactgcaacctccacctcccgggtttaagcaattctcctgcctcagcttcccgagtagctgggatcacaggcacgcgccaccacgcctagcttatttttgtatttttagtagagacggggtttccctctgttggccaggctggtctcgaactcctgacctcaagtgatcctcccgccaaggcctcccaaagtgctgggattacaggcacgagccatcgcgcctggctgatttaggaactctttaaaaaatgtttaaataaaacatttttgtattgtcttttttttttttttcttgaggcagagtcttgctctgttgcccaggctggagagcagtggtgcgatctcggctcactgcaacctctgcctcccaggttcaagcgattctcctgcctcagcctcccgagtagctgggattacaggcatgcaccaccacgcctgtaatttttgtatttttagtagagatggagtttcaccatgttgcctaggctggtcttgaactcctggcctcaagtgatccacgcgcctcagcctcccaaagtgctgggatacagtacaggtgtgagccaccatactcagccaatttaggaactctttctaaatgtggtaatacagatacctcaaagctaaaataatattcccaagcctttaactttttacgtgatggaatattgtgtctcagcagaatattgagttgcctttctttttttttgagacggaatctcactctgttgcccaggctggagtgtagtgctgcaatctcagctcactgcaacctccacctccccggttcaagtgattctcctgcctcagcctccctaatagctgggattacagccacgcaccaccatgcccagctaatttttgtatttttagtagagacgaggtttcaccatgtgggccaggctggtctcgaacccctgacctcagatgatccgcccgcttcggcctcccaaagtgttgggattataggtgtgagccaccgcgcccggctgagttgcctttcttctcaactaaaaataggcctgtttgtatcaccttggccatgcctgtctactctgtattttgattcaaatcaaactatcataatagttatgctaataacacataaggtaaagacagggtttaataaatttgtttattatatcagttatgtgatctatataatttctcttgtctctacttcattttatattctcagccaaatgcccagtagtggttttatctttttgaagtgtgagattatctccccacttcttccaattcttctttcttctttcactctttttttattttattgttttttttttttttttagaaagggtctccctctgtcacccgggctggagtgcagcattgtgatcgttgctcatcgcaacctcgcctcaagcggtcctcctccctcagcctcctgagtagctggggccacaggccgatgctcccacgcctggctaattttttcatttttgtagagatggggtcttgctatgttggccaggctagtctcaaactcctggcctcaagtgatccccccgcctccgcctcccaaagttctgggattataggcatgagccactttacctggccccaaatgatggctttcttattctttcatttcttcaacgtggataaagaactaaaacaaaacaaaaccaacaaagaggggagaagggaaggaaagcatgttaatttgctgctcaaatgccccccgatgtggtggtcatgtcaagctgacttaatgtttttttgatttgtcactggtttcctttgagcacttccctactttctggcctaacataagatgatgaacatgagatgttccaagcttatcttgtattttctctgctccagccctggaactagccatttttcttagaagcaggggtggagagcaccctccccccacgcaccttcactaggccccagtgggaagaactgctgcccatctgctcaggtgtggtgaaactagcaaagagtctcctggctgcctgtggagagtctctgtatgtggtcctcagcccagcctgggggctcctgggctggctaccatgctgcctctactgtgtctctagatccaggctctgctggaagagccctggaaggcccagcagaagggggagcctgtcctgacaaacatccctctgttcctctggctccaaggctcaggaatagggccagatgacatgtccaggtggtgccaggacccctcactgtccccttggagatgggcccagagagccttgtgggggcacctggagcctgaggctgaccgtccctccctgtgtcctggatgaggagccctgtcctgagaagacccccaggggctggcctgcgggcgcagccacaggaaggggagggtctgtgggctgagtttgggcggggggcattagtagaggactttgggcactacgtgtcagtggtctgatcagcgggggccttgtcattaggaacctggtcaggggatgggtgtggtggctcatgcctgtaatcccagcactttgggaggcctaagcgggaggatcgcttgagctcaggagttctataccaccctgggcaacacagtgaaaccccctctctactaaaaatacaaaaagtagctgggggtggtggtgtgcacctatagtcccagctactcaggaggtggaggtgggagaattgcttgagcccaggagatcaactctgcagtgagccaagattgtgccactgcactccagcctgggcgacagagtgagccctgcctcaaaaaaaaaaaaaaaaaaaaaagtaaagtccaaaaacaaacaaacaaaaaaataggaacctggtctgggaggattggttaacagggacttggtcatccaaggcctggtcagtgggggccttgtcattggggaactggtcagtggtacctggtcagcagggactgggtcagtgggaactggtcagctggctgctgggtgacctcaggtaaacagtttgtccctgatgcctccttgcctccatccctgagtcacagacccccagaggtctactgggaggaggaggtgagaaggtgagttgaatccaggcctgccccttagacctagcactttacatactacctgagtcccccaagggaggggccagctctctgccctctgccttcagccctctgccctcagccctctgccctcagctctctgccctcagctctctgccctctgccttcagccctctgcccctactctgtctgcatccccaggacagacccatatggagagggcagagactgaggagcacccatggatgctctgatgctgaccatgggccctagggtgacagtgatgaggacgtgggtgtgcacgtgagtgtgacacacacactcacacagatgttcacccacacgggatgctcacatgcacagacacatcacacatactcaggttgacagtgcagggggtggaggacgctgactctcggccctttgtgggtgctgtgaccccaaaatatcaccatgccaaatgcccacctgcctgcctctgtgtcacggagcagtcagaggcacgccagtgtctgtgagtgctgggcacgtagggctcttttctaggcaagaggcacatctccgaacagctgccagatcagactcaagagcatgacctgctctcttccttccctgctgacttggggacagtcactgcctggtgggtgatgctggtctctgggcagctgccaaagagggtcattcctgggcactcaccagtgcttgttctgtgctgaccatgtacacggttgtcttgttcatcctcgtggtgactccagggggtgggtgctgtccccaagtatacccattcgacaggtgagacatctgaggttataagggcggtcactggtccaggaacccagacgtgaccctgggccatgctctcacccctgccctgtgctgtgtgggactcactcccttacgcggtgccccttatgccctcgatcccaaatctttccaaaatttttgacagcaataggacagagcctggccttggaagagcccctgtgggtggggtggagggtggtcttccatccaggtctgtgtcctaaggtgggtccctgcaagagaagatctcatcaacccagactttgggtgcagtcagtgggggtcgctgtgggacccactggacatatgggatctcttgtctgggagtggggtggggagccctctgtccttgggcagttgtggaaaatgatggcgccccggagggttggttggagggtgatgatcgttcctcctcttcaccgggaactggggctcttccgcacaaggccctttctctgttcctttacgggcctcgccctttctttgttccgaatgttcatgggaagggaccctctggagttctccaggaccaagtcatcagagttctcattctttctcagtgaccccggaacacgagggtccttcctgtattgacagctcagaacttgggatccactgtcccttcacctgagacatcttcatgagcagagaggctgcattgaccccaaaccaagcaccctcccgtttggctgatgttattcttgaagcggcttcactggccagagggagtggagatgggggtgaaacggagcagtcacgaggtgtcttgttccctgtaagaaactgggcatcttcatggtccctgcgtgatcccaggaggctgagcatatggagctctctgatccctgaccccagtctacctgcaggtgtctgaaatagcgcaccacaggcccctcaccctcagcagatggacaccgttcctcccttatgtgcctgatttagggcatttggggacaatgggcctctgtgtccaggtccccctgttctcaaatcctcaggaagaagcccacctctggctggggcagggactccagagaccccagcaggcatggggaccctagatctggccccttttcacccggagcggtggtggcatggggttcacctggccggcggcgtctcagagttgggtggaagcggtttgggtgttctctgtagcacccaggtgcagtgtggcctttggacaatgttgtctcgcaggatggacatggaaaaggattacagctgccctgcccgcgcaggagcgggacatcattgacaagtgtgagcaggtccgggtcgggctgttccctcgagggaggcgaggccacccatctccagctgtatcctggtcggagtgtcctgggctccctccggatgcagggccaggaccagctgctgggaacttcatgcccccacacccctcacctcggccccctcaccctgaatcccctctgggtcacagggatgctgagcagaggcacctgcagacgtggggcctgaggatattgacagctacaaagtcaccgatcacctcgggattcggcagtgagtcctctgttcccaccctcaccacccagggatgggttttttttttttttagaaaggcctcactgaggcaggacacatctccccagctcgtgccaatctcctttctagcgtagaaactcctcccctgtcaaagtcctttaaatgctcaaactgcctgctttggattcttattgaacttatactccaccctgtggtacaggggctaatatgctgggcctttaccacttcagcccaggttcgattcctggtcagggaaccagtgccacttgtcttaatttgcatgactctttaccctttgagaggtgaacccagaaaatccgtgacaggtctcagttaatttagaaagtttattttgccaaggttgaggatgcacccgtgatggtctcaggaagtcctgacgacatgtgcccaaggtggttgggacacagcttgcttttttttttttttttttgagacggcgtctcacactatcacccgggctggagtgcagtggcgcgatctcagttcactgcaacctctgcctcccagactcaagcaattctcatgcctcagcctcctgaaaggctgggattacaggcacccaccaccatgcccagataatttttttttttttttgagacggcatctcgctctgtcgcccaggctggagtgcagtggtgcgatctcggctcactgcaagctccacctcccgggttcacaccattgtcctgcctcagcctcccaggtagctgggactacaggcgcccgccaccacgcctggctaattttttgtactttttagtagagatggagtttctatgtgttagccaggatggtctcgatctcctgacctcgtgatccaccagcctcggcctcccacagtgctgggattacaggcgtgagccactgcgcctggcccacagcttgcttttatacattttaaggagacatgagacatcaatcaatatatgtaagaagtacattagttctatccagaaaggtggggacagctcaaagcaagcccccaccccccgggggaggtagatggaggctgagagatcagaccttgcggggcacttggggacatcaggtgggacaggccccaggtgcaccctcagtgcactgggcaggtctcaggatcctggcctggtaatgtggtcactccctcgaggactgcttttggggcccagtcacccaccctgggccatacacgtcctttctcaggactggactttctcagctcctgcagagggcactgcctctagcccaggaggggcagccctgttgtgtagcccaagcccatgctctacagggccctagtggtccctgccccacccacacacccctcttctcccaggtcctgtcccttcacaggcgtcagcccacagggagaccctcttcctaccttccctgtgtgtctcctgggctaagaccaggggtggggtggggagagacacggctggtccttccctaggactgctagggaaggaggaggacagctcccggcccagcacaggccctcagctctgtctgggttgccttacagtgagacaaagctgccatcgatcagtgccctggaggcaaaggtaagacctgctgcctgagaggctggtccagggacaggaggacttggcaggtggtcagcagcccgtgggcaccagcgatggtgagtgggagagacaggctgtccctgggaggggtggcagttcctgctggacctgaccccaagactctgtccccattggttgtttgaccaaactccaaactgagaaccgcagtcacggctcgggggttgctgtctgcttgcaccaggaccccacctggaggctagtacttgaccaaagtccagtgtctgtggcctgaggatggcatgtcccaggtcgtgaggccaggtcacagacgcctgttcagtcagagggtctcagtccccggggcctgccctttcctggttctttttgtggttcagtcccgtcagggcctcggagcccaggatacagcatccaaaggctgcttcaggaagccttggtagctccgctaacttctggtcatagttgacagcaaagacgtcaggagatgagaggcacagagaaatggctccagatgcttcaagacgggcagggatataggagtggcaaggaggtgacatggggagggagggcccccgtgaccgctctctacagagtcagggggatgggctcccatggctgggtcctggcactgcctgcctctcagagggtgggtgacacactgtcctcaccctggacagcaggtctggtcaccagctttcctgtttgtccctgcaaacctcaacttgctggagacagtgtgatgccagggcatgagccaggactatctcagggatagggacaccccctggcaaaccgaaggaaggaataggtcaagatgagaattcataactctgaatcgtgggagggaggcctggtcctaggtaaactgcacatcccctgaaaaaccaacaagtcagagactggagacttccagaatcctcaggctccgatcctccctggggctgccccagaccctgtttcttcagagtgttctgtcccaagttgatagacagcgtgtataaaggcattctccatagatgtggggccaagtgtggtcacacttcctggatgtcgagaaggtgaaggccgagaactggtggaaatacgaggtatgacccttccgaagtcagccagaggaggacaaacaggccaggctgtgttgagagcccaagcctccagctggagggaacgcagagcctgggttgaaggtggagggggcatggtcaggcggacatcctgggcagagacggtgatgccagcaccaaaggtgagctgagctccaggactagttggattgtaaggaaccaagccagaggaggagctttctgcagaaggaaaccaaccttccttccttccttccttcctcctgtcctttcctttcctttttcctttcctttttcctttcctttcctttcctttttcctttcctttcctttcctttcctttcctttcctttcctttcctttcctttcctttcctttcctttcctttcctttcctttcctttcctttcctttccttctttccttccttccttccgggctgcctgtggacgactgccgtgtggggcagccagtcttctctctgttcagaggctgcttcctcttcctggccctgccctggaggtcatgaagatgaagggaaagaggtcccccctggaacttccaccagatcaacctggatgtcagccatacactaagaaaccacatgatgttttggccacaatgcagtgtcaattaaggcttgcagggctggagagccctggggagatggcgtgaaccagagggatgggagcttcaccagagcagaggcaggggtcacccaggaggggtgacagagctaccaaaagctttccaggcccagggagcagctagcacaatagactgagtgccttcctggttgcaagccctgggcctggctgggatatgtggggccggagcccaggtggctcccgaggagacagagagcaatgaacaaaatcatgagaaatggtggaaagttcagtaacctacgggagggcggcaggatgaggggctcgggagccttcccaagccacactgacgacaccaaatgccgagacgatgtgcggtcccggggacctttgtccctgccaggtgggaatgcgacagggcacagcccctttgggaacccgttgggcggctctgcacgaaactcggtggactcgtgccacatgtcccagaagattctcagagactgatcccactgatttgaaaactgatggccatgtaaaacctgcatgccacgtccacagcttgattcaccgtcactcacagttgaaggccaccaagacaatcttcaacccgggaatagtaaaatccactttcaccaaaacatttcataaaactcagtggccctgaagagctcactgcttattctgcgcatcatctggacctggaattggattccttgttggaacacgatagagagaacaaaacagcatccgtgtgaacccaaaccctcttttctctctttcctaggctgcagcatgtctttcttgtcctggtggcatattgcacctaatcccatgagtattccaaggcaacaatattcgcgggtcacattcccatattcataggcacgggtgtcttgggtagggggtgtcattgcttctttaaaattcagtatctgacacctaccaagacgcagccggtaggactcaagctcgctgttggcttgaacattcaagcgaggcagggagggagggtctcagaggggtcatgctgagatggagagggctcaggcacagactcctggtctgacctgagcctgacccccaatctcagaacaagaaatgacaccctcctcctgggcttgccccaaggtccaggagctggtcagtgtcccaaagtggtcctcccaggaggcatttttgacaagttgccaaagtacccgatggacgtcgctcttgtcacgaaatgagtgtggatcccgcggaagctgttccttcattggaaaactggcagggatccaatgtcccctccgcccgaaccccactggagcgcagcagacagggagggggttcctgaagtgcctgctcccactgtgcccccagtttccagatcactcctggagggacagccactgagctggctccatgggctgcacacacagggtctggacccagcctccctctcatacctggcaggcagcccctgggtcttcccaggaccctgtatgcggtgggcccccagcccgccctgttggccagcctagctcacagatgctgtcccaagcctggcacggtggcctccctggcctggcatctgagggggagggacatccacggtcctctcctatgtcctctcgggccatgtgggcttggacactcgctacaggaatctctctggactccttgtcaactgagacgtgcgtgacttgctcagtcctgacacccagtgtcaggagaggggtgaacaggctgcaccccaaatcccacagggcctgtggcaggcctcctcaatgacatcagtcctctcaggtgacctcagccctcccaggtgacatccttccatggtgactctgactcttgcaggagctgggctactgcagggccatgagctgcattgctgccactctcctctatctgcccagaaaagataccttctgagtggtggcccagctgctggctggtgagaggcactccttgcagggtaggtggacagctgcccatggggactcacacagccaggcctggggatggtcaccctggctaggtgatctcagcttccaggcaaggagccttccttgtgtccccagctcgtttggagcctctaggatgttgcctgctgtgggtcatgcaggagcctgggactggatagggacccccacaccctgagttagatgcctctcatccccatcagcagagggcatcacagcctccctgtggctaccttctgtatcccggaggcttggtcctccaaccccgactttgcgcaggcaacgctcacctccctgagggtcctcctgcctcctggtggctgactgtgctcctagccgtcctcgtcaccctcagacaggcagatgaaacccagacagtaatgcttcctcatcgcatgtcccctagcctgaccctatgaatgtccagaagacagtaatgcacccccagcacccaccccgctcaccctgctggcccctgcctgccacgttcctccctcttggcctccacggcaggcctctcctcctaatacctcagctcagggcccccactgggcagctcctcccgccaggatcccggggacattcctgcccctcctcccctgggccaaggctgcatgctggaggggccagatgggagggtgggagacctgggggtctgaggacccctgccagtgccagctcttccagctgacggctccacgtcttgggagcaggctttgattttgtgataggttgtgggctctcaggattctgcagttcaaattgtgccaggctccagagactctaagcccacccgggacacgtgttatggacatcatccccgaagcttatgaggacttggtgaggagacggtccccttggctcttccccagaggcttggggatcaggggtagagggaggttctggctcctcctcatagggggtgagaggttgagtcccagcaggggccagacctgggatgtggggttctccatgggattgtagttgggtttcctttttctgctctggagcaggcagaggctctgggacggggactgggctctggctgagctgggctaagggaagtgtgtccaccgaaggtccatgcggggggcaggtgtggcggggtgccctggggaccgcccagtgttctgtccctcagggaagggctgcagaggggcctgaaatagggatgttttgggggcagcccaaggggccctgagcacctctgctcctcccatcaggacaaggatgagctgcatgcccagaattccacgtttacactggctcctctggtgctttaaatgggggtaatgaggcactggaagctcccagtccagggaccctcctgccccgcactgcttggctcccccagcccaggggtccggcttccccaggaggacctggctcacccccacccagcaggaggcacaggcgggtccccacagggcacacaagccaggcaacacctgagagggggcatcccacagcagaggccagggcagaacgggccaggtctccacttggaagagcccggggaagtccaaggccctggggagcccctccctccaggagctacatccctgctgagatgagtcccctccatgaggagctgcaagacctcttctgacccagcctcatggtggcagctcatcccatggggacgggtccctggcactccaggggactgaaaccacagtgggccctgcttgggccaccagctcccagcctggaagggccaggtcctctcacacctgctgtccccacagatccccttcgggttcagcctgaagatgaagcatgcaataatggcaatggcgcccacggccttcgaggttcacagaagcaagtccccctgtgtctgaggtttcctggggaactcatgggacacagcctggctggcctgaggcctctgtccccatgaccttctgctctcatcagaagggatggccagggatggccaggcctggcctgtagggctgggcagggcatagtgggttctcccagaccctgagcccacccttgaaatgagtgatccatgtgaaaggtgggagtgtggtgggaacctccctgcccgggcctcccccggccatggcctcctgtgcacagctggaccccagggttggccacagaaggacccagtgctgctcagtgggaggtggcagtgttggaaacggggtgtgggcaccaaccccttccaggaacccctcccggcctgatgcccttcctgtcccttgagcgaccatgaacctgtcccagtccaccctgtgggagggagttctttcaggaccggtgctcccaggcctgggccctggaggatgccacagtgctcaggcactttgaggcctttgtgggggaactgatgagccagtgctgggatctgccaccccctcgtgggctccagcaccaggtcccctctcctaagtcatcctctggagcattcgatagtggagagggccccggccccaccagccctactacctggcccttcctcctgcacctctttttctgtcttttcctcctctacactaagcagcttctgggcaggtgctgagcgcatatgtactggacatgctgctcagacaggcagggactggagaaagaaccctcaacgccccctatgctttttacatcctctctcctctgtgcgagctccctaaccaccatcccaacatcgacagatgctgagaggagcaggggccgctcactccagaatccccctccaaggacgtcagggcaataagccttgagccaggggaaaaagagaatcagtgtcactgacccagaggacttggggagaggacacggataggagccctggccagagccagatccaagagttcagccaggtgcaggtgtgggaatggtcccgtccaggcatggagtggacggtcctggagggcaaagggggccccgtgcctgggaccatctcacccactgtggagatagtgtcttgtgtgaggtggcaagggggctaggtgacagccaaggcctctcccacctggttctgaattagggctgctacccaggccacacagccctgggatgaggaggtgaaggaggaagtctggagccagcctgaatcctaagccacagccccaggagtgacgtgaggtgccccaacagctccccgtgccctgagggatccacacacctcttgctctgtgatcagcagcctgcaggggtgtcctcagagtcagactcaagaagccacacagggatgctgaggacaccagagacccaggtctgtggggcccagccttgtgaggacttaatggacttggaggagaagctgaccgctcgcatctgctattttttcagccaaacccaatcgagggtccttggcacccaggcctctgtgagcataccctggcattgagcccctctgcaagggagatgggctggcccgcccctgcctaccagcttagctccaggggtccatgcagccagccccctaccccggaatgcaaccctggtcctctcccaccctgacctggctggcagtctccaagactgaggcccaggggcacgaaggagcttccagaaagctcagggcagcaggttgctctctggggatcctgagggttcagaatggacccatgcattttctgaactccctcccgaagctgcccagagacttggctgtcagaggcccgtggttcccattgtgcaattttgaacagggatgctgtgctccgtcccttccacatccaccctacacagccccaggaccatcagtggggcccagccctgcaaccccatcttggccacaacaccaggccctgctgggccccgtgagaactgagaggcaggtccagagataagtcccttgcatgggggcacttgcatcggacccctcttggtgggcaatgactagcatggcatggaaggagccagggcagctcccagccagttgctctgcagccccagatggctcctgggccttatgaagtccctctcaacagggaagctggtccctttcaggctgccagagggaggggtgaacgtggtgtcctcccagccctggccagccaggagcatgccctgtggcctctgatttgacttgttggacagagtcccctcccagggcacaagtcctaggtccagaggggcccggcctcaaccccagccctgcttggtaggggagggcaccggggtgccatgggcctttagctgcagcaccgatggccacgcaggggacatggcacacctcacccggttgttgtaccatttcaggtcagagaaccccggcaagaacttgctgcaggaacacgaggtgctgagcctgtgcgggagcaggacatcaagggctgctcaagagcgtccatggctacagtgactgtggcctcttcccagcctcatctgtgccgtgcaggtgatctatgactccaagctgggactggcaggtgatggtggccccagcatctcagccacgctgccaacatgctgtcaggaggcttcgaggccatgcccggtatgctgcccacctccttgagaccccttcctgacactttccagccggtgctacagccgcagcacgtgccaccactgaatacctttcagcagccggtgcaggcttcagacggcaggcgtgcccgacagccgtggcctcagcagctctttcgtggcaaccaggacagtcagggcagtgatgaagtgatgatgcctaggacgacaagtgggatggcagctccgtgatggtggatgagcctagtggcggttcacacctggtcctcagtggctccctgagcccccgtggtggcaacagcttggccaccatgaggcgcagtctcaaccgcttccccacctgtcaagtcaggcagggaggccttgtgcttggcgaggcgttgggctctgtgaaggacggggacaagctgtgcgtggctctgtggctctatggcctcaagtggcaggagaacccctactccttccagtgcactaccagcgacaccgctcagtagaacaagttcaagggcatgaatagcgtcctctcctgcaagctggtgaccacgcacaggcaggtcccagtgcacggcgcaacaagcacttggactggctggatgcgtgtctggtgacattcctggctatgtctgtgccccacctacctgagaagtgggccacgagctgcttccaggaggacttcatctccaagcacaggtagagcacgatctgcgggatgagctacacggccggccgcccagtgctggcgcagtgccacgtcctccagcacttcctgatgtgcctcagcagcaccgagagaaggcctggaaacaaggcaagaggaaggccttctgtatggcacagcacctcttgaggaaagaaaataagaaaactgcctccgatccaagcagagcaggtcagcgagaaggtgggcatcacttgggggagtggatgtgggtatcgaagacgaacactggatacgtggcctggtcatgggaggtgggtggtgcgagaaaggtgacatggtgggtgccagctcgttcctgaccctgagcactgcaccaccactgccctcgacctgcaggaggtggagagcatgattgacagcttcatatgctttctcaagaaggtggatgacggcgctgctgctcagccacagggcatggagttcacggcaagcaggtgaggggctttgagaaggagcatcggcagggggccagccctcccgcggcctcagccaggctttggagtgggcccagcaggccttctgggtgggcctgaaccagcccatcaaccttcaccggaggtgcctacaataccatcgtcaagctcttcccagattggcccagacaggacctggattctgtctcggacctgttactgctgtccaagcagcaacgcatcaaattcccagacatcctccacgttcacagaggagctcttaccaaagtcacggggagcaggagactcgtgggaggaggaatgatggaggtgcgggggctgatggcgttcaggagcgtgggacacgagttctttggccactttggctgaaattcaccatctccatccaattcgagggagaggtttgagatcatagatgcagcactttttaccagagcaatacatatttttccaaaaatcgatgtagaatttgaaagcagctctttataaagatgagagtgttgagtgactggatgttggattggggactttttccagttcaaggataatttccacagcagaataaaaactgctatcaaagagccatggccaactatttgtggtagtacaaggatggttttgtgctcaactgaggccagtttagaatagagaattatgtgggaaataaacagagaacatggcgatggaaccacgtgttgtaacttcgtaggcatccatactatggaagttccttccttctctccttcctgctgtctgtgcctcctcccagcatcgggcatctccatgtcctgggcctgtgccgggagagatataaaggacaccattggctataggctggaggactggcacggtcaggggagcccgtgaagtcagagtggcccctgaggaccagtcctgggatgactgggtccaactgaccaggcccctgctgaccagggccccatgcactgggcctctgccatgacctggccctcactgaatgggccctgatgaccaggaccccactgaaaagtccccccctgatgaggccccactgaccaggccttactgactgggctccccgtgactaggccccggctgactaggcagctgctccaccccccagccaagccaggcccccactgattgggtccaatcatcagtcagccagtggccagagctgcaccgaccaggtccccgctgatgagttacttactaaccaagctcctggaaaccaggttcgcactgaccaggcacaagaccccactgactaggtcttcatgacaaggccctcgctgcccggactccactaactaggcctcatgaatgagactttgactggtaatgtctttgctggttatgcctccactgtccaggcttccagtcatcatgtccccttgggccacgtccctcctgactgaacagtcccccagtgtctattccccgcactgactaggccctcacatccaagtcccactgaccagatattctggccaggttttcaccgactaggtcccactgccagactctaagaactaggccctactggccaggcaccctctgaccaggtttctgctgacaagaacctgctgaaaggtgttcgctgagtaggtcagtcctaaccagatcatccatgatcaggtccccactgatcatgtttccactgaccaggcccaaaaggactaggccccagtgaccaggcccatcactgagcaggcgctgctgacatagaacaggcccccactgtcaggcccccactgactaggccacaatgactatgtctcagctgaccaggccctgatgattaggtttaatggacaaaaccctcgttgaccaggtcccactggccaggtccccactgaccaggtccccatagatgagactctgagttaccaggaccccactgaccagacatctacagactaggccccaataaccaagacccactgaccaggccctcactcactgggctccaactgatgagattctgactgaccaggtccttagtgaccagactaggtcacttattgactaggccccactacccaggaccccaattaccaagcccccactaaccaggtcccaagtcaccagacccccactaactgtcccaactgacaaggcccccactgccgaggcttccactgaccaggtccacactgaccaggcctcgagagatgaggcccgacttaccaagaacccactgaccagagagacctccactgactgggcccaactgacaagggccccaccgacagggaccaactaacagggttccaactgaccatgtttttactgaccagactttactgaccaggccccacagctcagtatccagtgaccagaccctcactgactaggtctcactgtaaggcctcaagtgaccaggcctcactatccaggacacactcatgaggcttctactgccaggcccccactgattgggcccaactgaggaggccctcactgaccaggtccttaactgatgagattccaactgaccaggtccttagtgaccagacctttactgaccagcccctactaaccaggaccccactgaacaggtcctcactgacaagatcccagttgatcatgtccccagtgtccaggtttcactgactaggccccaccaacctggtcccctgacaagcctccaactgaccaggtctccactgactgggacccaacttacgaggcccattagccaggcctcactgaccaggactccactgactgggccccatctgatgaggttctgattgaccaggtccttaatgaccaggcctttactgaccaggccccactacccatgagcccagtgaccagaccctcactgaccaggttccacggccaggcctccagtgaccaggcctcactatccagaacccacggatgaggcttttgctgccaggctgactgcgcccaactgacaagattccaactgaccacttccttcactgatgaggtcccaactgaccatgtccttaactgacaaggttccacctgcccaggtcccaactgaccaggtccttaactgatgaagttctgactggccaggtctttaataaccagacctttactgacccattaaccgggaccccaatgacccagaactttactgaccaggccccactagccaggaccccaatgatcaggccccactgaccaggcctcaattgatgaggcctcaacttaccaggaccccagaccaccactgactagaccccactagccaggaccccctgatgaggcctccacttctaggccgccactgactgggctatactcacaaaacccccaatcagacctccagtgaccagtcctcactgtccaggacccacggatgaggcttccactgccaggcctccactgactgggcccaactgacaaggccccctctgtcaacgtctccactgactgggccttaaatgacgaggttctgactgaccaggtccttactgaacagacctttactgaccaggccccactaatgaggactccaaagaccaggcccccacagacaagaccacagttgattatgctcctggtggccacgtttcgctgactaggccccactgacaagtccctcactccctaggtccccattgaccaggccccaaatgatgaggcctcagcttactaggaccccactgaccagacctccactgagtaggccccactagccaggccccactgataggccccccaattccagaccccactgaccaggtccctccactgactgatgaggttcccactgaccaggtccttaatgatcagacctttactggctaggccccactacccaggaccccagtagccaggtccccactgaccaggtccctactgaacagacctccactgactgggcccccattgccagatttccactgaccgggcctcattgaccaggtttccactgaccaggaccccaataaccaggtcacactcaccaggcccccactgaccacatttcagctgaccaggcccatgctgaccaggacacactggtgtagccccaagtgaccaggccctctgaccagtcctctctgaccaggtccccgcagaccgggtcctcactgaccaggcacctgctcaccaggcttcctctgactaggtctccaatgattgtgtccccattgaccaggcccccactgaccaggtgctattgaccaggctgctgctgaccaggtcagcactgaccagacccccactcacaaggacctattcgccaggccctgctgaccaggtcccacatgactccactgaataggttccactgatgtggccccaataactcagctatattagtgtgttcttgcattgccataaaaaaacacctgagactgggaaatttataaagaaaagaggtttaattggctcatggttctaaaggctgtacaggaagcatgatgctggtatctattcggcttctggagaggccttaggaaactttcaatgatggtggaaggtgaaagcgtagcaggcacgtctttgcttttttttttttttttttttgagatggagtctcgctctttcgcccaggcggaagtgcagtggcgcgatcttggctcaccgcaagctccgcctcccaggttcacgccattctcctgcctcagcctcccgagtagctgggactacaggcgcccgccaccgtgcctggctaattttttgtatttttagtagagacggggtttcaccgtgttagccacgatggtctcgatctcctgacctcgtgatccgcccacctcagcctcccaaagtgctgggattacaggcgtgagccaccgcgcccggccacaggcatgtcttacgtggctggagcaggaggaagtgtggggggaggtgccacacacttttaaacaaccagatgtcatgcaaactctctcacaagaacagcgctaaggggatagtgctaaaccattaatgagaaaccgccccatgatccaatcactttccaccaggtcctacctccaacactggggattccaattcaacatgagatttgggcggggacacagattcaaaccatattgttccacctctggtctctcccaaatctcatgtccttctcatatttcaaaatactaccggctgcgtgcagtggttcacgcctgtaatcccagcactttgggtggccgaggcaggcagatcagaaggtcaggagatcgagaccatcctggccaacaaggtgaaacctcatctctacaaaaatacaaaaaattagccaggcatggtgatggaggcctgtagtcccagctactggggaggctgaggcaggggaatcatctgaacccaggaggcagagattgcagtgagctgcgatcgcaccactgcactccagcctggtgacagagggagactctgtctcaaaaaacaaacaaacaaacaaacaaacaaacaaacaaacaaactaccatgccttctcaacagtcctgcaaatatttaactcattccagcattaactcaaaagtccacagtccaaagtcttatctgagacaaggctagtcccttctgcctatgaccctgtaaaataagaaacaagtttgttacttccaagatacaatgggggtataggcattggatcaacattcccattctaaaaggaagaaattggccaaaagaaaggggctacaagcctacacaagtccaaaaccaagcagagcagtcattaaatcttaaagctccaaaataacttcctttgacctcctatcccacatcaagggcgtgctggtacaaggggtgggctcccaaagccttgggcagcaccacacttgtggctttccagggtttagcacctgtagatgctctcaagggctggccttgagtacttgtagctttttcaggctgagagtgcaagctgccagtggatctaccattatgatgtcaggaggacagtggttctcttctcatagctccactaggaagtcctccagtgggactctgtgtgggggctccaaccccacatttcccctccacactgccctggtagagattctccatgagggttccactcgtgcagcaggcttctgcgtggacatccagacttttccatgaatcttcctaaatctaggtgaaggtttccaagcttcaactcttgcactttgcactgcaatggtagtgcaggtccactgaaccatcaaagaccaggtacatgcctctgcctggtgttctcaactcatccaccagtgtggagctgtcatcccacttttcattacggtcatcatcgctgccctggctggcctggctgccaccagaattgctgaggtgatgactgcaggttccccagtccccggctctggaaagcctgcactggcagctggaaggcccctggtggtggcacttgttgtggctgcagcagcagctagagggctttgggaggcagcttcgaggaggtgggtaccatggtgagaagggccttgaagcctctgggtgacacattgccctagcaggctggggcaccagggctgctgtcactcaccaggcctggcctaggggcaatggagtgaggccttgtctctaagaagcatctgcatgacagaaaacatttctatactatacgtctgataatgcattaatatcacaaatgtataaaaactcaaacagtccaacagcaagaaaacaaatactataaaatattagcaaaggacttgatatagacatttctcaaagaagacatgcatatgagcaaaaagtacatgaacaaaagcccaagttcaataatcatcagagaaatgcaaattaaaaccagaatgagatgtcacctcacatctgttagaatagctatttcaaaaagtttgaagtgcactgagtctggatctttagtatctttatttcactacttcttctaatgtaaggatttggtttgttagtctttgatgtgtctttttttttgagatggagtctcactctgttgcccaggctggagtgcagtggcgcgatcttggctcactgcaacctccaactcctgggttcaagcgattctcctgcctcaacctcccgagtagctaggactacagacacgcaccaccacgcccagctaacttttgtatttttactagagatggggtttcaccatgctggccaggatggtctgaatctcttgacctcatgatctgcccaccttggcctcccaaagtgttgggattacaggtgtgagccaccacgcccggcctcaatgtgtctttttatggttttcagtaaagttttatggtttcacataggcctgggaatgtcttctaagtcgatttcatggcacgtttgctaatgtggatggaggctgactctttgttattgttactgtatgtttattattagtatgaaagattcaagatttattatatatacaatgtgcatttgctcaatttcctgaatgttgttaaacagtttttgttctgaaagttgaaatcgattaccctgcttttctatttgtactcatggcctctgtggataactacagttcaaattctttgacttacattctttcctgtttcctcctcttctctcttctggtccagactcaggcatccctcacagtgataaatgggagaggccttgccggcccttgtcttagacttttctttattgaaacacttctgatgtttgctgttgattatgatgtttgcacaaatatctttgcttaataagaattttatttttgccttttcccttccttccctcccttccttccttccttccttccttccttccttccttccttccttccttcctttcaaagcatgatctctgatgtttcttaggctggagtgcagtagctagtcacagatggaatcatagctcactgcagcctcaaactcctgggctcaagcaattctctcacctcagcctcctgagtagctggaactgcagtcatgtgccaccattcccagccagaagtttctattatcctatttggtattcttaatcatcacatattttattcaaggatatactaaagtgattacatattttttctactgtagtcttttgatcaaataaagaacctaaataatttattttttgagacagagtcttgctctgtcacccaggccgcagtgcagtggtgccatcacagctcactgcaacctctgcctcctgggttcaagcaattatcctgccttagcctcctgagtagctgggactacaggcgtgtgccaccacaccttgctaatttttgtctttttagtagagacggggtttcaccatgttggtcaggttggtctcaaactcccgacctcaggtgatctgcccaccttggcctcccaaagcattgggattataggcgtgagccactgtgcccagccttgattttatttttaatagtaaaatgtacttgaatagtttttggcgtaatctggtagtagaaatacacaagatatcaccattagatactgctaatcaaacacttaaaaggtgcaagtatccaggtgattttgtatacaatctgggtctttttgtcagactaacgagtataatgagatttgatatttgcttctgatgttgctggacaaactgggtaaagaaaaggattaagtcagggattccaagtttttaatacaagtactgcattaatatcctaaaaatttatatgtagccctgaagaagatacttaactcctgcagcttcagggctcaaaatgctgaaaagaaatcatagcatctcatcccataactggctgaattacaacaaaaattaaattcccaggcttgcaggatgcctacttttaaagtgggggtattcattcagaaaacattggatattaaaaagttaaaatgagggccaggtgcggtggctcacacctgtaatcccagcattttgggaggctgaggtgggaggatcacctgaggttgggagttcgagaccagcctggccaacatggagaaaccccttctctactaaaaatacaaaattagctgggtgtagtggtgcatgtctgtaatcccagctactcaggaggctgaggcaggagaatcacttgaagccgggaggtggaggtttcggtgagccgagatcgcaccattgcactccagcccctgggcaacaagagtgaaactctgtctcaaaaaaaaaaaaaaaagaaaaaagaaaagaaagaatgaaatgctggatcttcattggtttgctataaagtgattcaaaagctttgaaagatttgaatgataaagtgtatttttcctttaaaacatactcaactgaggaagatccaggagatacaccattcatcataactgtgagacatacatttgtgagaggagtcccagtatctccaaagagcttgatcaccacacttctctgtaggacagaacttacaatgaagattgttgccaccgaaatgaaaaatctaaatgcattggttataaccggatctcgggactgcaggatttaagtggcagcactcaactgcagctgtgaaaaaaatggtgggaatggttatttaacagactgcaaagtcaaagcaagcaataagaatagtttgactcatgggcttcctagaattagaatagagggcgcagtggctcatgcctgtaatcccagcactttgggaggccgaggcgggaggatcacctgagttcaggagtttgagaccagcctgaccaacattgagaaaccccatctctactaaaaatacaaaattagctgggtgtggtggcgcatgcctgtaatcccagctactcaggaggctgaggcaggagaatcgcttgaacccggaaggcagaggttgcggtgagctgagattgcactgagctgagatcataccattgcactccagcctgggcaataagagcgaatctctgtctcaaaaaaaaaaaaaaaaaaagaattagaatagacaggaagactactaagtttttacttgatctatataagtagaaaagttcaagtcaaacaaagccaaacctgaattatgaaacaaaaaacaaaaccaaagatttatggcttctcaattttttttttttttgagatggagtgtcactctgtcacccaggctggagtgcagtggcgcaacctcggctcaatgcaacctccacctcctgggttcaaacacttctcctgccttggcctcccgagtagctgggattacaggtgcgtgccaccacgctggctactttttgtattttttttagtagagatggggtttcaccatgttggtcagtctggtcttgaactcctgaccttgtgatccacctgcctcggcctcccaaagtgctgggattacaggtgtgagccaccacacctggcttggcttctcaattaatttccagtctcgaattagtttatagacccagaactccttgaatcaatgagatgctgggtccctatgaggaagaaatccagtatactattacaaatatatactgttaatttgtccccctcttttccccaaagaaaactatggccttttaccggagaacctttgcattgggaaaaaagaaataatcagacctttgaggaattactgaatacagtttctgaactgatactaattccaggagaactgaaatgacattgcagggcatttaccagagtaggagcttatggaggtcaggcgatcaatggagttttgaatcaattctaattcccagttggcctggtgggtttctcaaaccacccttcggttatcttccccgttctggaatacataattagattagacatactcagcaactggtagaatgccaaactggttccctgaccagtggagcgagagctattttggtaaaaaaaggtcaagatgaagtcatcagaactgcgtattcctaggaaaaagtcaaccaaaagcaacagcacattcgtacagggatttcagagactgaggccaccaggaaggtcttaaaagatccaagggtaggctgggagaggtggcactttgggagtgctgagttcagatttgggagcccgccgaggtgggcggatcatgaggtcaggagttggagaccaacatggtgaaaccccacctctactaaaaatacaaaaaaagttagccgggcgtggtggcatgcacctataatcccagctactcgggaggctgaggtaggtgaatcgcttgaacccaggaggcagaggttgcagcgagctgagatcgtgccactgcactccagcctgggtgacagagctagacttggtctcaaaaaaaaaaaaaaaaggaaccatccaagggtcatggctctcatttcatcctatgtaagtcactgaataaacataagagatcttggagaattatactggataaacgtaagcttaaatcatatggagactcccattgcagttgttgtaccagatgttgttttattacttgagcaaatatacacatccctggtacctagtgtacagctattcatctgcctaatacttttttttctctatcattgttaataaataccaccagaagcagttcgctttcaggtggcaaagacagaaacacaccgtcactgtcctacctcacacactagtaattggctcgggcttctgtaacagcatgccgactgagtgacttaatcaatgtattttcttctcacagttgcagaaggtagaagttataatcaagatcatcagaactggcatctggtgagatctctctccttgggttgtaagtgaccaccttctctatgtccttccatggactttcctctgtgcttttgtggtaagggagatctctaatgtctctttctcttcttataatgacttttttttttatagaaccctagccttataacctcatttaacctttttttgtttgtttgtttgttttgttttgttttgagacagagtctcgctcttgttgcccaggctggagtgcaacggcacaatctcggctcactgcaacctccacctcctgggttcaagtgattctcctgcctcagcctccctagtggctgggattacaggcgcccgccaccacgcctggctaattttttttatttttcatagagatggggtttcactatattggccaggctggtctcgaactcctgacctcaggtgatccacccgcctcagcctcccaaagtgctgggattacaggcgtgagccaccgcgcccggctctcatttaatcttaattacctccgtaaaggcctatctccaattacagtcacattgagggttagagcttcaacatatatattttagagggacatagttcagtcaataatagtgatatatcaactcttcagccttatgttacagcttagtttgctgggatcttggtcaccttttccttccacaaactatcacactggttctttacattgatggtattatgctcattgaatatagtgagcaagaaactcactagacttattggtatgagaagctcactctagacttactggtatgaaatttatgtcaggatgtaggacattaatccaacaaaatttcagaagccttctatctttgtgagatttatagggtcccaatggtttgggacatgccaacgtatcccctggaagcagaggagtaagttgttatatttggcttctactacaacaaaaaagaggcacaactctagtgggccttttgattttgaaggtaacatatttctcatttggtaagttactctggcccatttaccctgtgacccaaaaagctgctagcttttctttactcagcagaaaagaatattctacatcagatccaggctgtcgtgtcacttgggtcatgtcttccaatagagtcaaaggtgctgaaattgttgatggcagatacagatgatctttggagcttctggaaagctcctgtgttaatcacaggaaagattttggaggaaaatcatgccatcctatgtagataattgctctttttcttttcttttcccttctcccctcccctccccttccttcctttcttttctttttttctttcttttttttttttgaaacagcttttggcctgttcctggggcacagaaaatacactggaaaaatttatattgttaaaatgtccatgctggccaggcatggtggctcatgcttataaccccagcagtttgggaggccaaggcaggtggattgcttgagctcaggagttcaagaccagcctgggcaacatggtgaaaccttgtctctacagaaaatacaaaaattagcccggcatagttttgcatgcctgtgattccagctacttggaggctgaggtgagaggattgatttagcccaggaggttgaagctgcagtgagccatgattgtgccactgcacttcagcctgggtgatacagcaagaccctgtctcaaaataaaataataaaataaaataaaataaaataaaagtccatgcttcccaaagtgatatagaaagtaaatgcaagccctatccaaaccccaatggcatttattattaaactagacaaaaataattacagatttacttggaaccaaaagagaccttaaacagtcaaagcagtattgagcaagatgaacaaagctgacgatattatactctctgatttcaaaacattagaaagcaatgccatcaaaacaagatagtactggcataaaaacagacataaagaacaatggaacagaatggagagtcccagaataaatctaatatatgcatacaatcaactgatcttcaacaagggtgccaaaaatacacaacagagaaatgagagtcttttaagtaaatagtgctggaaaaattggatctctatatgcaaaaggataaatgtggactcttacttcataccatattaaaaattaacttaaaatggattaaatatttaaacataagacctgaaaacataaaatggctagaaaaaaaatatggaaaaattttcagaactttggacattgagatgcttttttttaaattagacttcaaaagaacaggcaacaggccgggtgtggtggctcacacctataatcccagcattttgggaggctgaggcaggcggatcacctgaggtcaggagttggagaccagtctggccaacatggcaaaaccccatctctactaaatctattttaaagattatttgggtgtggtggtgcactcctgtagttctggctactcaggaggctgaggcagaactgcttgaacctgggaggcagaggttgcagtgagccaaaattgcatcactgcactctagcctgggcaacagaatgagaccctgtctcaaaaaaacaaaatagtaagacaaagaacaggcaataaaatcaggacagacaagtgggactacctcgaatagaaaaacttctgaacaaaggacaaattcaacaaatgaaaaggcaacttaaggaatgagaaaaaaatagttgccaataatatatctgataaagggttaatatccaaaaatacaaggaatttctacaactcaatagcaaaccccaaataacaagattaataaatgagtaatgacctaaataaacatttctccaaagaagacataagaatggccacaggtatattttaaaaaatgctccgtgtcattaaatgtcagtcaaatgcaaatttaagtcacagtgaggcatcacctcactcttgtgaggacaggtatattaaaaacaaacaagcgtgctaaagttatgaagatactggaacttttgtacacagctggcaggaattaaaattggcagcaacaatggaaaacaacatacagttgtctcaaaaagttaaaaacagaattataggtcgggtgtggtggctcatgcctgtaatcccagcactttgggaggccgaggtgggaggatcacttgaggtcaggagttcaaaaccagcctggccaacatggtgaaaccctgtctctactaaaaatacaaaaaaaaagtagctgtgagtggtggtgcgcacctgtaatcccagctactcgggaggctgagacaggagaattgcttgaacccgggaggcagaggttgcagtgagctgagatcgcaccactgcactaaagcctgagtgacagagtgagactccgtctcgaaaaaaaaaaaaattacagtttgattcattaaactcaattctggggatacatccaaagggaatataatttggatcttgaagagctacatagttctgtgtctattacagcattattcacaatagccaagatatggaagccacctaaatgtccatgaaggatacatgaatgtgtcaagtaaaggtagtatatacatgcaatagaatattagccttaaaaagggagtaaatcttttcttttcttttttttttgagatggagtctctgtcacccaggctggagtgcagtggcgcgatcctggcttactgcaacctctgcctcctgggttcacaccattctcctgcctcagcctcccgagtagctgggactacaggcgcccaccaccatgcctggctaatcttttgtatttttagtagagacggggtttcaccgtgttagccagaatggtctcgatctcccaaactcagctgatcagcctgcctcggcctcccaaagtgctgggattacaggcgtgagccaccgcgcccggccagtaaatcttttcatttgtgacaacatgaatgtacctgaaggatactaaggtacacattaaggcacgattgaaagaagccagacatagaaagacaaatacatcatgatctcacatacatgtgaaatatgaagtaattatacgtgtagaggcagagagtagaatggtgttttccagaagctgagctgaaagaaaaacgggggttggggggatacaaagtttcagttacccaaaatgaacaaactggtctggatagtggttttttttttttttttttttagtaaaaccataaaagctcaggcaacgaaaacaaaaacaaatggggttatatcaacccaaaatgcttctgcatagcaaaaaaaaaaaaaaaaaaaaaaaaaaaattaacaaggtaaagagaaaagctacagaatggcagaaagtattttcaaaatacccacccaataaggtattaataaccagaatatacaaagaactcaaatgacttaatagcaaaaaacaaacaaaaaaagaatctaaatttaaaatgggaaaggatctaaccagatacttctcagccaggtgcagtggctcacgcctataatcccaacactctgggaagctgaggcgggtggatcactggagctcaggaggtcaagaccagcctgggcatcattttttgtagaggtgaaataccacctctacaaaaaattcgctgggtatggtggtgcacacctatagtcccagcaacttgggagtctgggatgggaggatggcttgagcctggggaggttgaggctgcagtgagctgtgattatgccactgcactctagcgttggtgacagagagacactgtctcaaaaaaaccccaaaaaacaaaaagcaaacccaacaacagactcctgtcttcagccaaaaagaccaggaaagacaccttatcaaacaaaacttttatccaatgtgccttctatgctgggataaaatgagggtagatacaataggctttctttcccttttgtgttttataaattgtatttgaatatcaaggaacaattgaaacattgttaactacgataatttctgaatataatgtaatacgttgatctaacactaaaaaagctatactcaaaaacactacaaataaatgaaattttaaaacatgttcaaattatctacatgaagaaagtaaaaatcacacagaggaacaaaacagagagaacaaacagaaaacaacgtatcaggctagttttaacaaaattaacttaactgttaaatgttctgaattaaccaagtagatctccgctgacacacaacaaaaacatgctggccaaagtggatgaggtgaagttcacaatcaacacccaaatgaagaaggtgctatgtctggctgtggctgtcagccacgtgaagatgacagacgatgttacacacagacgatgtgtgtaacattcacctggctgtaaacttcctgatgtcactgctcacggaaaaccggcagaatgtccggcccttatataacaagagcaccaccggcaagccctagcacctgtattaaggcacatttgaataaattctactgccaccagtcaaaaataaataaataaaataaaataatcaattagagacaaagattgaaaacattgattttttttttttttttgagacggaatctcctctgtcgcccaggctggagtgcagtggcgagatcttggcttactgcaagctccgcctcccaggttcacgccattctcctgcctcagcctcccgagtagctggcactacaggtgcccgccaccacgcccggctattttttatgtatttttagtagagacggggtttcaccgtgttagccaggatggtctcgatcttctgacttcgtgatccgcacgcctcagcctcccaaagtgctgggattacaggcgtgagccactgttcccggcctgacaacactgattaataaatatgaccatgcatattctctttagaagaaactcacttccaatataaaaaggtaaatttagaataagccctctccctctccccctccccctccctctcccctttgcacggtcctcgtctcccctttgcacagtctccctctgatgcggagccgaggctggacggtactgccgccatctcggctcactgcagcctccctgcctgattctcctgcctcagcctgccgagtgcctgcgattgcaggcgcgcgccgccacacctgatggttttcgtattttttggtggagacggggtttcgccgtgttggccgggctggtctccagctcctgactgcgagtggtctgccaccctcggcctcccgaggtgccgggattgcagacggggtctcgctcactcagtgctcaatgttgcccaggctggagtgcagtggcgtgatctcggatcgctacaacctccacctcccaactgcctgccttggcctcccaaagtgccgagattgcagcctctgcccggccgccaccccgtctaggaagtgaggagcgtctctgcctggccgcccatcgtctgggatgtgaggagcccctctgcccggccgcccagtctgggaagtgaggagtgcctcttcccggccatcatcccgtctaggaagtgaggagcgtctctgtctggccgcccatcatctgggatgtggggagcacctctgccctgccgccccatctgagatgtgaagagtgcctctgcccggccgcgaccccgtctgggaactgaggagtgtctctgccccgccgccaccccatctgggaggtgaggagcgtccctgcccggccgccccgtctgagaagtgaggagcccctccgcccggcagccgccccatctgggaagtggggggcagctcccgtccggccagccgccccgtccgggaggtgtacccaacagctcattgagaacgggccatgatgacaatggcggttttgtcgaatagaaaagggggaaatgtggggaaaagaaagagagatcagattgttattgtgtttgtgtagaaagaagtagacataggagactccattttgttctgtactaggaaaaattcttctgccttgggatgctgttaatctataaccttacccccaaccccgtgctctctgaaacaggtgctgtgtccactaagggttaaatggattaagggcggtgcaagttgtgctttgttaaacagatgcttgaaggcagcatgctctaagaatcatcaccactccctaatctcaactacccagggacacaaacactgtggaaggcggcagggccctctgcctaggaaaaccagagacctttgttcacttgtttatctgctgaccttccctccactattgtcctatgaccctgccaaatccccctctccgagaaacactcaagaatgatcaataaatactaaaaaaaaaaaaaaaaaaaaaaaaaaaaagcagaataaaatcagaaaaaaaaaggtaaatttaaagtataagaagctgggcaaggcgtggtggctcactcacgcctgtaatcccagcactttgggaggctggggtgggcgaatcacttgaggtcaggagttcaagaccagcctggccaacatagtgaaaccctggctctactaaaaatacaaaaattagccaggtgtggtggctggtgcctataatcccagctacttgggaggctgaggcaggagaatcgcttgaactggggaggcagaagttgcagtgagccgagatcacgccactgtactccagcctgggcaacagagtgagactccatatcaaaaataaatttaaaataaataaataaagtataagaagctggaaaaagatacaagtaatcaaggaaagcatgagtagttacaataatatcggataaagtagatttcagagaaaaaaattgagacatggagagaaattacataatgataaaaagcttaatccacccagaagacccagcagtcctaaatgtgtaggcataaatcaacagacatgaaaaatgtgaaacaaaaactggaacaaacagaggagaaacagacaataagacaaatacacaattatcgttggagatattgacatttttctctaaacaatagaacagagaaaatttcagcagcaaatctaaaaaaaagacaacagttcaacaccatcattcatcaacaggatctggttgacatttgtagagtaatttaatcaacagcagcagcatatgcattctcttcaagggctcatggaacataaagtaagatagaccatctcctaggccatgaaacaaacttcaacaaattttaaaaatcagattacacggagtgtgttctcggatcataatggagtcagactagaaatcaataatgtgaagacaatgcaaacatctccaactcttgcaagcttgaaggggaagtccctgggaaaacaaaaaatacattgaccacaaagatgatgaaaagacaatggatcaaaatttgtaagacacaactaaagcagtgtactgaagaaactgatggcactaaactcatatattagaaaaggctggtcgggcgcggtggttcaagcctgtaatcccagcactttgggaggccgaggccaggagatccagactatcctggctaacacggtgaaacccggtctctactaaaaatacaaaaaaaaaaaaaaaaaaaaaaaaaaaattagccgggcgtggcagcaggtgcctgtagtcccaggctgaggcaggagaatggcatgaacccaggaggcggagcttgcagtaagccgagatggcgccactgcaccccagcctgggcgacagagcaagactgtctcaaaaaaaaagaagaaaaaaaagaaaaaaactaagtctccagataatctaattttccacatcgataacctgggaaaaggtcaaacttaataaactaaacccaaacaaaagaagtattaagaaagaaataataaagataggaagagaaataaagttgagactcagaaagtaatagagaaaaaccaataaaacagacagctgattttttttgaaaagatcaattaaatagacaaacctcaagcaagactaagtgggggaaaggacaagacacaaattaccctgtcaggaatgaaacaagggatatcggccaggcgcggtggctcacgcctgtaatcctagtactttgggaggctgagtcaggtggatcacaaggtcaggagttcgagaccagcctggccaatatggtgaaaccctgtctctactaaaaatacaaaaaataaaaattagctgggcgtggtggtgggtgcctgtagtcccagctactcgggaggctgacgcaggagaattgcttgaacccaggaggtggagattacagtgagccaaggtcgggccactgcactccagtctggctacaaagcgagactccatctcaaaaaaaaaaaaaaaaaaaaagaaacaaaggatatcattacataccctgcagacataaaaagaataataaagtgtattagtcgtctagggctgccataagaaaataccagagtctgggtgagttaaaataaatcatctcacagttctggaggctggaagtctaagatcaaggtcccaggacagctggtttctcctgagccctctgcgtatggcgccaccttcctctgtatcctcacatggcccttttctttttttcttttcttttcttttttttttgagatggagtctcactctgtcaccgaggctggagtgcagtggcacgatctcggctcactgcgacctccgccccccaagttcaagcgattctcctgcctcagcctcctgagtaattgggattacaggcgcctgccaccgcgcccggctaatttttttgtatttttagtagagacggggtttcaccatcttggccaggctggtcttaaactcctgacctcgtgatccacccgcctcagcctcccaaagtgctgggattacagccgtgagccaccgcacccggcagggctttttcttctaattggcccgttctagtgtttctctgtcccttctcctttattttatttatttattcatttatttatttattgagacagagtctcgctctatctcccaggctggagtgcagtggcacaatctcggctcactgcaacctccgcctcctgggttcaagtgattctcttgccttagtgacctgaatacaggtgtgggattacaggtgtgcgccaccatgcccagctaatgttttatttttagtagagccagggttttgccatgttggccaggctggtctcaaactcctggcctcaagtgatccgcctgccttggcctcccaaagtgctgcaattacaggcgtgagccacagtgcctggcctctatctcttcttatcatgatgatagtcatactggattatggcctcactctgatgacctcatttaacctcaattacctcttaaaaatctccctctccatacccagtcccaatgagggttgggacttcaatatgaataactctatacacataaaatttaacagcttagatgaaatgatttaatcactcaaaacataaattattataattacccaattaaaaaactgatatttttgaattgccctacactaggaagaaactgaaatcataattttattttttatttatttatttatttattttttttgagatgaagtctcgctcttgtaccccaggctggagtgcaatggtgtgatctcggctcactgcaacctttggaataatgttcatgagcccaaagacaagacaacctttggaataatgtccatgagcccaaagacaaaattcccagcttaataaatggcccaacagcatcagaattagaagatttagaagtaactagaattcttcctagctccactggaaaggatgaacatgggggctcccgcaagataagtacagggccagtggacagtgactggtctagtgagaatagaatcccaaagatcctgggaaataaaattacacaacaagcttccaggaaacaagtggaacaaacgaggcaacctcgcagatactaccaggaatggataagcagaagagggtcagagccacaaaatctaaacaaaagacaccaaaccacaagaagcacccagccctgtgaacaccagctgtggctacatctgtaccaatcttttcagacagctgccgtgggactgctgagagcagccacacaccaaacagcagtgcatctgaacacaagtcccaagacactcctctctattaatcctcattttgagaagatggatatggttatgttacaacatccccatacaacacttgtgggcgagggtaatcagacaccctcacctaaagagggcacaggaaggaggaggatgaaaacagagggctagggaagggatgtgtgctctggatcacatagactttccccacaggcactatttaaaacaaaagaagagccctagaaatgtgctgtggtctccctatacttcctcatcttgccacatgcataggtgccacgtggttttgttttgttttgttttttgagatggagtttcgccctttcgcccaggctggaatgaagtggcttgacctagactcactgcaacctccgccccccgggttcaagcgattctcctgtctcagcctcccgagtagttgggattatagcgcctaccaccacgaccggcaaatttttgtatttttagtagagatggggtttcgccatgttgactaggctggtcttgaactcctgacctcaggtaatctacctgcctcggcctcccaaagtgctgggattacaggcttgagccactgcgcctggcagatgccacaatttttttttctttctttacacaggtgctgatgaactcaggtgtaattaaccctaaggggtaaattattcactaagtgcagtaatagggtccaatttttatgaccaggttttcagttctttgatattgtcctacattcagaaatcacaaatgaaaaatactggaatgtgtgacgtgaacaatgtcttggaggttaacatccaggtttttacatattagatgtaacaacatgaaagctggtaccatctgggaaccaaaggaactgtccctgagaacacagaattttagggacatcaattattaagagtttacatggaagcagaagtgctcctagatgtttccattatctagatagaaaaattcaacagatgagccccagtgagtcaaggaacatctctgacagctgtgggtgatgggctttctatccaaagcagagatgtgaaacctgacgggtttcaattgaccccgaagtgctccatatctcaaaagtcaatcccacaaagctggaacgctatctgttcctgagggatcaggtcccacctgtgtctctaagacactgccttgagatgaggccgatgatttcaaacgtaaattgcctaaattatcatcagcttcatgttgtgttttggagcttgtccacttaagtgggttgataaaaaatggctcacaagacacatgcctgggaaatggggttttcttctttgctcttggcagatcctgggcaaccctataattaaccttcttgatttctcaattttcacattcgcgaaaaaggtgccagtgcgcgtgacatttccctgaagccacagcccttgtcaccccctgcaaagctctgaagttgtgcacaggtaggccaggtggcagatttctctcaaaagcggctgagctcgcgctctggctagggaaggcagaggcctgcggcacaaagtacattgtcttagacatcaggacagtgtctatagcagtttaggaaagaaggcggctccctgggctggagacgacgcaatgctctgggaagacccctgggtgcgggtgagagaggaatccgagctgcacaaggccaatgaggggaggacgacccgcccgatttagataaaggtaaggcatacttcctagcttaataccctcctcaatgcccagcccagacctgcctttcacgtccctagctgtattcactctccctggcgaccgggcggcgtagaatcggcggccagcagtgctttagacacaggttaagtgtctgcccctccctccagggttacgcaccaccccgatgcatactgggattgtagttctgaagctacctacccatgggctgagagcagtaaagagactacaactcccagcataccaggcgcggcgcgcaccgccctgccccttcctctggggttgcgaaccgcccccgagcctggtacaggctgggattgtagtcctgcagccttgtggccgaagggctgggactggccatgagattacatgtcctagcatgctcagccaggcgcgcgcagctctgccccttcctccagtgatgcgcacagtccctgatccctgtgcacgctgggattgtagtcctgcagccctgcgatcacttgcaggtaacaagaaatttcagcttccggcatgatgggcgaaggcccccaccttcagcctcgctcctccatgccttcagagctgttccgccatgcagacggggagcctgcctgttctttaacctctcctacctgatgggagaggacaagctaccaggacagcttgtctcaccaagaaattgtgataccgcatcccccaacgtgctggcttcctgacttccaaagttgcggtaagtttgatttctcacagaactgcaagagtccgggatcgtttcccagcctgcccaaagttgccatggttctcaccctctgggaggttggcacacccagtgacaccttgtgtcccttgaaactaatctgtgtcaccttttaggcttttgagaccacttgaactctgactttgtggcatttattaccaaatctactaaaatgggtcaactgtcagattttaactccttttccacacatgttggttaggtaatctgttgattagacatggttttctccaaaaggggattatctcttcctgattgcctccaagagaaggatgaaacgattgggcgctctaaggatctatttcccaaatttgagattccacactgatcattcctgggcaaaatgtgtctttctgttccataaccacaatcttaggccagcctgagtgccatcccagcccaatgggggttatggaactccaacttagttctgtttaagttttatgtaaatatccttgtctctgtttcacctggctctgttagataaaatgtctaggagaaagtaggaggtgacaagaatacaggtgaaatcataggtactggaatggggcacactgattctgtggaagcagagggagaacaacaacctaaaacccagggaatgaacaacttagacctcaggagctgtggggaatggaggggcattaataactttttgtctttctgaattacccctggtgcaacccagaaaagagtctgggaatcttgttgggccaggacaaaagtagttttagttagaccagaaggtaaggcacaagctgtgaattcatctcctcctttggctccccacattaaccttaagaatcctttgagactgttctgtctctctgtgatgtaggtgtggaattctagggggcagcgtgcactctcagtgcccagctgtctgagaccacagttccctcagatgatgaatgatatggtttggctgtatccccacccaaatctcatcttgaattgtagctcccataattcccgtgtgatatgagagggacctggagggaggtaatcgaatcacgggtgtgcatctttcccaagctgttctcgtggtagtgaatatatgtcacaagatctgatgattttatagagggcagttcccctgcacatgctctcttgcctgccaccgtgtaagacatgacttcgctcatccttgccttcctccatgattgtgaaccccactgccctgacctacagccatgtggaattgtgagtcaattaaacctctttcctttataaattacccactcttgggtatgtctttattagcagcatgagaacagactaatacaatggagaaccatcgcttttttctgaagagactcagtcccccatgggtaagcttaagctggacgctaggcagcactgattatattttctccttctgtgaactggagctcctccttccattttcctaccaccactaatctttttggtcaatatttggataaattagagacatagataagggaatgttagccccagcatagctagactcttgcttatttctcttcccggtttatgaaatcaattatgttggcacagagagatacccttagatggggtcactcaggagcaattagagcagtgtacttctagagaagctgataggacagggcagatgtgccagtgaggatcacagcttctgtctaaatttttgagtctatctgtgtgtggcagatgaattcaggaaagatcccagatccctggaaagggaccattaagagaggattcatgtagatcagaacactagggcatgtgttcatcagtgaccttctaagtcagattgacagggttaagtctgtggtagggctacagagcaatgcttgcccatgaaagcctctgatcatgtgtaaaatatgtggttctggcacggggagacatctttatctgacagaacattgtacttctgtggatgtgggattctttgctcttccttaacagtgcaccactgactgattgtttgagaatcacgcatacataggcctgtttattttgaatttcttaaatattggaacaggaaaaaacatttttatccactttttttcttttttttgagatggagtcttggtttgtctcccaggctggagtccagtggcgcaatctcggctcactgcaacctctgcctcccagattcaagcgattctcctgtctcagcctcccaagtagctgggattacagatgcgtgcctccatgcccagctaatttttagtagagacggggtttcatgatgttggccaggctggtcttgaactcctgaccttgtgatccacctgcctcggcctcccaaagtgctgagattacaggcgtgagccaccacgcctggcctttattcactttcaaattgaataagagcatgagcaacttcagggaaaatgtcacgggaggaaactctggggccctgcccatccccagaaacctcagaaatcctgatacaacctgtagaattcaccttatcaacactgattcatttttttgtatagatttatctttcattgggcctttattttgttctatgtcatgaagaacatgaagaataagtcatttctttcctttgtggtaggaacatcaatttttcacatgtcaagtattaatgatgccatcctccacatagtttttcttgtttattaaatttttggtttggtctaaatatttgtgtccccctccaaattcatatgtggatagtattaggcatgcgacctttcgggaagtgactaagccaagagagcgccatcttcctgaatggaataagtgccctttttaataacattgaagggagtgtccttgtctttcgccatgtgaggacacaccaagaaggtatcatctatgaggatcagggctgtcatcaaacaccaaatttgttggtgtcttgatctagcactttccagcctccagaattgtgagcaataaatttctgttgtttttacattacccagcctaaggtattttgttacagcagcctgaatggactaagacactttcttaggcactttagtctatttctgaatttttagttccaattatctattagcttttatttatttatttttagacagagtcttgctctgtcacccaggctggagtgcagtggcacaatctcagctcactgcaagctccatctcccaggtttgcgccattctcctgcctcatcctcccaagtagctgggactacaggtgcccatcatcacgcccagctaattttttttgtattttagtagagatggggtttcaccgtgttagccaggctggtctcgatctcctgacctcgtgatccacccaccttggcctcccaaagtgctgggattacaggcctgagccaccacgcccagctgatctattagcttttttaatcaagatttttcacagggctggacaatattatctgttttttttttttttgtttccccagagttttcttggctcttcttgtcttttcatctatatgctgttttattttatgtatgtatgtatgtatgtatgtatgtatttatttttgagacagagtcttgctctgtcgcccaggctggagtgcggtggcaccagcttggctcactgcaacctccacctcacaggttcaagcaattctcctgcctcagcctcctgaatagctgggattacaggcacctgccatcatgtctggctaatttttgtattttcatagagacagggtttcaccacgttggccagcctggtctcaaactcctgacctgaagtgatctgcccacttcagcctcccaaagtgctgggattacaggtgtgagccaccgcagccagcctatatgctattttatagtaaaatgcctacctccaatatctaatggtatctatattagaacaaaatttattttataaactaccttgaggacaatttatattgatagtatattgtttttcggtctaagaacatgtaatttttctatttgcttatgtctacattcatatattttatgaatgtcgtatgtcttttctcattctgtaaacctttgtgtaatatggattcctagtttattttattcctctaaaaagtaatctgagacacaataaaattgtaaagagtttatttgagtaacagcaattgattaattataggacaccagtctaaaagaggtttaggtttcactgacagtgtaagaggcaactatttattggaaaaatgtagaaacaaattatttgattagtggtagttacaaacttgtttcttcttggttttttgtttgtttaccttgttgaaaagtccctagttatataaggttgttggctacttctgattggttgagcttcatttctgtttttctttaaaataggcagctataagaaataattcaagttaagtttagccaggcatggtggcttacgcctgtaatcccaacaccttgggaggcggaggcaggtagatcacctgaggtcaggagttcgagaccagcatggccaacatggggaaaccctcatctctactaaaaatacaaaaaaattagctgagcatggtggcaggcgcctgtaatcccagctacttaggaggcccacagtctggttaaaactccaactgccattttttctctttctgacacataaagtgtaaagggttttgtcaggtcaggtagccccagggctggcgccgacatgagtttttcttttaactcacgaaaagctcgttgctgttggttgtaatagatgtagtttatccaatttacatttttattaactgtcacccaccaaaatattgactcgaatcctgcagctatttgatttcaagctttaaattgatttggtattccccatgggactccagttgcatctaaatagacgtgagagttgaaagacccataaggggcttctctcgctttacgatgtcttatttttcttccctctggttgatgaaatgccagggtgaaagggatagccaattggactaaagtacaagtgccactccagttattggcagaatgcccagtaaaggtctaccacaatatcaccacacattagctcggggatgaacaagggctgattgataagctcttgaaaattcttaagctcactgcatcccttcaggtctccaaggaacgctaagtttttctccctatcatgagagacacaaagtgaacttagtgttgggagatggaggctggatggccctcggggactgacctgcagggtgccggactttgggatatagcagggagagcttggcacgacttattactccaggctgtagaatcctgaaaaagagctaccatgcagcccatgcctggtcaactggaggactaccttagtggaaaggggacaatctgggcctctggcctgccatgtgcacaagcataacaattgcttttgtttaacgtgggatggaatatttgatccattccaaccaggcatttgcatgttggtatcctgtcttaattgccaaagttcgttttaagtctttaacttatatgatcctctagtaaaatgaatgcatgattttagggaattacaaaaaccatttggggcagtccacacttgctctttagtggtccacagaatgttggaccaactacagcataaaagctctacgttggggagcaagactcctggttgacactggagtctttatcaaaatttccccagattaaatagtcctaatttactaatgcccagtctgaggagagtcaggggggacagaggtacttttctgaagtggagagctgtctttcacttgagagtccccacagggtataacaaggcaagcattaaatgcaatagtttgaggcaaaattgacttggttatgttaataactagatggtcagcaatagaatgaggaaagaagaaagagtaatagaacagattttgaaagagttaaaagttttcttagctttagtttggtagggttttcccctgggactatggcccaagactctggagggggcggtgctttcttgactcagttgtgatgagtccatcctttttccattgtacgaacagcagtctcagtggttagcagcacaaggtaggggccttcctagcctggctcctttcttttcaccttttgatgagaatgtgatctttaggctggtgctggtttgctggaaattctaggggtggtacatgtgctaaaagacttgtagttttgaggtaaaggaaagtggaagataaaccaagtatataatttctaagaaactgaccttttgttttaaatgtggggacatcagcagtggactttatagtctttggtgcctttctactgagaaatttcttttagcacctgcttttattagtttttagaccaaagaaagccaaacaccattatatatttaataatgcttcttgtatgatttttataccagataagctaaatttcaccattatattagtgtgttattaatgtgaaacttaattttaataaaaccttgtagatatatttatccaatttttaatgtcagaccataaggtaagatttttatagactctttttaaccttttataatttttgttaaagagtacgttagtgctttaagaaaaacccgttgtgtttttattttaatgtccagttcacaaaaaaactggatgatacccctttaactttagctaatatgtttacacacagaattttctttaaaattaatgtttaaaaacttgcttaaaccttcaaaacaataatttttttaaccttttaatgtaggtaaaaatttacattcttatgcctccttataatccttttaccaaaggtatattttactttccttatacaccttgcacataaactgtttttttcaatagttttacattcaggaggcctagctacttttaaattatacaacatttcttgcataaattctttttttataacatttttctctttcatgacttttgcagacaattctttgacgtgcctcaactttctgacttattacaaacctttctttctttaaacaaccagtttctttatttcaggacaagaatttaccatataacactctttttacataaattcttcccccacttttttcccttttttttcaaagatgataaccattcttttccaaagtgaacttcctttatgtctgtggacgagactgtctaaggccacaagattagaagttactataatacatgttacactgttaacttttagcaaactttacttttgttgaaaaccttgtaagtttgggattttaattatcctttgccattaataagaccttgttttgtccaaattaatttagaattggtatagatggctttttttttttccttcaattacctgggaggaacgattgatcctcctgtcctgaagggagttcctcctaggtctggtcggacctttgtatggtaattaagatttagatgccctgttaggaaaacttctgggttaagggaattttcagtggttaatgttaaatcacacttttttttttttttccttaggatacttctgaactggtgaggtgtgctcacaatgaggtttcctcacaatgaggtttcctctaaaagttatttttttactttcttctgttagcaaagcagttgccgctacagattgaatgcatctgggccatctgcgggttactgggttaaggatttttgataggaaggctacgggttatcagtggcctcagtgctttcagaatacgcccttgtttacactgacaacaaagtggtattggagtcttatagggttatggagaataccttcaattatcaattataggttttaaatttaccctggcttttaaaggaatagggtacacttttttcttaactacttgtatatctctctttctttctctgattttctttttctctttgactttccttttgcctctgtctctttctctttctctgcctctctctctctttccttgactccctctttatctctctgtctcttcctctttctctctctgctggtctttccttgcctctgcaagcttgcttatgctgctgttctctcaaccattgtggggtgggggtctaaaaccagctataaccaagtgtccatgtacaggaactggtctgggtgccctggcttacaggttaccttgtgccgtacctttgaaacaagggacctgtccaatcttccttctgatggccaacccacctctaatgctggccagtctatttcacacaaagttctaagttttcctggtatcacagtaacactgtaatctcccttaaatcctttcttgaaaattttcaacatagctcctactggggcaggcttactttgtgcctgacccatgcttcttcaagacaaaacaccacgctcgcaccacacgcacaccacaaaacaaataacgggtaaaaagggcacacacatacttttacagtttacaccaaaccagaatcaataccaaaatcggggtatctagaaatccaagcaaggtcaaaaccaaaaccaaagtatcaagcaatccaagtcaagtcaaaaacaaaaaccaaagtgccggtacaggcacgccataggtgatcaggccacacttccactcaaatggagtgggcaagttccaaagactagtcttaccaagtttcagatgtccagactccaagtgccagttccttcccggtgttcagtcactgcattgatcctccgcgggggctgccacacgctgctctggtgaggcgttccaccagggaatttgcttacccgggagcgctctcaggatccgcatcgctcaagctggccggagtcccccgcagggatgctccacagggcaggcctaagccgcctaacaggctgcctcaactgtccgttaatcacctcgcttcccagtcagggaaccaagaaatgtagcaggacgagccgtagacaaaacccctcagacaccgagttaaagaaggaagggctttattcggccgggagcattggcaagactcacgtctcaaaaactgagctccctgagtgagcaattcctatccctcttaagggcttacaactctaagggggtttgcatgagagggtcgtgatcgattgagcaagcagggagtaagtgactgaaggctgcatgcaccagtaattagaatggaacagaacaggacagggattttcaaagtgcttttctatacaatgtctgtaatctgtagataacataaccgattaggtcagggctcgatctttaactaccaggcccatggtgtggcgctgggctgtctgcctgtggatttcatttctgccttttagtttttacttcttctttctttggaagcagaaattgggcataagacaatatgaggagtggtctcctcccttagtggcgcatgcctgtaatcccagttacttgagaggctgaggcagaagaatcacttgaacctgggaggcggaggttgcagtgagccgagattgtaccattgcactccagcctgggcaacaagtgcgaaaccccatcacacacgcaaaaaaaggaggacactatggtaggctgcttgggagttaggagctgtatctgacatgaggccaggagaagccttggcaaagctcacatgaccttcaagctcctttcactccaaaacatgagcaaggactgtgccgttgctttccattcctcaggtggggacaagaagtggaaacctatgcagacactagataggttttgttttacaggcaaggtaagaagaactacagaggaagaacctaatgcagacgtttcccaggagactttaactgaagtatcagcaaactgaaaggtaacgagagaatcttgtgcctctgagggtgtctttcccatggatccctgctcagttgcctttcacgggccccctgatttgcgtgaactcctgacctcagatgatccgcctgccttggccctccaaagtgctggaattataggcatgagccaccgtgcctggcctgttccatgcattaaaaaaaaataaaaaaattaaaaaaaatcagtgagaacaagaagaaatgtaaatgctgggcttttcatataaatccagggaattatgggacagttagtacccacctcccagggtattataaggataaattcatgtcatcttcccagctccgtagcgtgcttctgagcacacagagcatgctccataaacattgcattaacgcatgtgtgcatgttgttttccaaatgcagacttactcagacatgagctgccttctccagcctctgtaaagtttaaaggaccagcagagtgtgccatgttttaggatagtgattggtggtttttattttggactgaaagcatttatgttgtgagaagagtataggtttaaggaactgtgtgctgtggcactttgtctagttgagtgctgctataagtgatctagggcaagtagggtcagcattagctgtgaatgaagccaatccatggacccctttcaaacctgcagaattggccaggcatggtggctcatgcctgtaatcccagcactttgggaggccgaggcgggtggatcacttgaggtcaggaggtcgagaccaggctgaccaacatggagaaaccccgtctctactaaaaaatacaaaattagccggatgtggtggcacatgcctgtaataccagctactcgggaggctgaggaaggagaattgcttgaacctgggaggtggagcttgtggtgagctgagattgcgtgccattgcactccagcttgggcaagaagagcgaaactccatctcaaaaaaaaaaaaaaaagaaaaaaagaaaaaaagggaaaaaagaaaacattaaatgcagcaagatgcaggtcagagcatacctccatttgtgtgctcttgtggacaaaatttaaatggcaaataagattttgcatttattgacgtttttctttacattgctgtaagtacaaatacccatttatcctttgacctcctatatctttattctgtatgcatatgaaaaaaaatgctagatctgtatctagattatacatgggtaaacacaacatatagaattatatgactttgcctatgtagatatttatgtatacaatagatattaatcaacattttaaattccccagcctacactgcggatgcagatataaacttactctcacctatatggatccataccatctcagactggaaaacagccatacaaggttatgtttaaacatcaataaagcttcacatataggtgcatggcctgggaagtatgtttttggtaaagccatcttagactctagttccagcttagcatttcagggccctgcttcctttctcactgtatgcctgtgtgattcacatttgccatttgggtcgattgacttatatccatctaagctgatctaagtggtttattaaactcatctgggctgcagaagttgagaaggaaagcaacctctgacctacttattctgaggcttgtctacaggacatatgcaataatgggaattacattgacatacctatgttacccattttctgtttttttttttgagatggagtttcactcttgttggccaggctggagtgcaatggtgcaatatcagctcactgcaacctctgcctcctgggtacaagcgattctcctacctcagcctcccgaatagctgggattacaggcacctgccaccacacctggctaattttttgtatttttactagagatggggtttcaccatgttggccaggctggtctcgaactcctgaccacaggtgatccacccacctcggcctcccaaagtgctgggattacaggcatgagccaccgtgcctggcctttctgtgtatatgtttatctagccaccgatatcatatctatatgtataaaaaagaccaccaaagtgctcagaggtgatttttattttccattcaggccaagtaaatccaatcagccattagctcagtgaagatttgtcaaatccaagccacacaccaaatcacgttatgctaaatgtgaaaatgtcctcattactgggcaccaaggtgttttaaattcagagtctaatcaaaacagctcatggggttctgtccatccagctaggacgcttcagacataccagtgggcctaacctttttcacaaggagctctggcctggccaacaagaatcacctttggtgcttcagtgcagtgtcaccatcacctgtttgaaatgcagccaggtaacatgtaccattttatttgctttcagtatcacagtctatcttctaataagaaacctaggcctctggctgggtgtggtggcttacacctgtaacccagcactttgagaggctgaggtgggtggatcacttgaggtcaggagttcgagaccaccctggccaacatggtgaaactcccatctctactaaaaatattaaaattagctgggcatggtggcatgtgccctctaatcccaggtactagggaggctgaggcaggagaatcacttaaaaccgggaggcggaggttgcagtgagctgagatgatgccactgcactccagcctgggcaacaagagtgaaactccatctcaaaaaaaaaaaaaaaaaggatttttttttttttttttttctgtgctgggtttacttagcatacctttcagattcatgaatgttgcaaataacaagactttatttttaagggctgaatggcatttcattgtgtacatataccacattttctttctccattcacctactgatgaacactcaggttgattccataccttagttattatcagtaatccacttccttccctttcatttgtgtttgttttgttttgtttgagatggagtctcattctgtcacccaagctggagtgcagtggcgcggtcttggctaacagcaacctccgcctcccaggttcaagcaattctcctgcctcagcctctcgagtagctggtattacaggcacgcaccaccacgcccaggtaattttgtatttttagtagacatggggtttctccatgttggtaaggctgatctccaactcccgacctcaggtgatccacctgcctctgcctctcaaagtgctggaattacaggcttaagctaccatgcctggccaaaagcctaggtttctttctatgtaagcctaggtttatttctatgtgaagtgtaaaagaaatttaaactcatagaagcagagagtacaataatgaaaaaaaaaaaaaatctcctatggggttttttgtctgattgagagcttcttcatgatctttcagggattgtattttctttcatcttctgcatcctcctgttttttagccaatggatgaaaaaaaatacagagaagacacatttgcttttatccactgcacttccactcactattagtcattgtggatacagctgagaatagcagttttctggcaggacagccacttctcagtaataaacaactgaaaaagtataaatgtgtcataaaaagctaatagattttaagaaaaacaagcataggcatcaataatgtttgtggtaaataaagattcatattgttgatttctattgagctcccgtaatatttgataaaagcttgcaaatatacagcagaaaaggagtattattctaaatcagaatattgttatggctattttgtcaatagaagtcaatatccaatatacagaatggttattttgtcaatgtaagtaaaaatatgacttcacactaatagtctcaccaatagttgtaatcaaatgctattttttatttaaaattttatttcatataagtaatcccaggcgggcggatcatgaggtcaagagatcgagaccatccttgccaacatggtgacagcccatccctactaaaaatacaaaaattagctaagcatggtggcacatgcctgtagtcccagctattcgggaggctgaggtaggagaaccactcgatcccgggagctgagatcacgccactgcactccagcctggggacagagcaagactccatctcaaaaaaaaaaaaaaaaaaggtctatatgtttgcagacagaccagatgttcaaagaaaactatataataaacatttactaataatttttcaggattcagaaatacatggattctatttctatttctttgtttttttttgaaatagagtcttgctctgttgcccagactggaatgcagtggcgtgatctcagctcactgcaacctccacctccggggttcaagcgattctctcctgcctcagcctccaggtgtgtgccaccatgtctggctaatttttgtgtttttagtagagctgggtgttggggttcaatcaggctggtgggaaaaatatttaaaagagtaacagtcaaaagctgtcctaaaaggcctgagagtttgcatagcttgattgcttggctgaaggcagccagggtctctttgcaggaggccaggaagattagggtgcaagtgaaaaggaatgtaggaagtttatcttactaacctgtttagttatatgggcttaagactaacttttgtcctgctgagggtactttactgccgcctactcgggggtccgcagtttattacccacaaatggtgtttgctttaggcctgggaacctggcctttaattttaccctctagtggtgtttactcacaacttttgttaattagtcttactgaataaatgcaagcctcactatctgatcagagccaagttgcaactgtttacagaactcaccttggagcctgtaagcggctcggaccctcagctggactggcagagcagaatgtgtgtcagtgtactttattcatccacagcgagtgcccccgcgaaaggagcgcttcctcagacggggtttcactatgttggccaggatggtcttgaactcctgacctcagacaatccacctgccttggaaagtgctgggattacaggcctgagccactgcacctggccatattttatttatttttctgtataatttttattatgaccataaaaataaacctgtagtcagtaacaatttaattgtacattttaaaataattaaaaatgtataattacactgtaattcaaaggataaatgctagaggtgatggatactttaccctaatgtaattactacatattgtaggcctgaatcaaaatatgccatataaggcataaagatatacacatactgtatacccacaaatactagtaatagatttcaataagaaaaaaaatttaagctatgggaacaattcaactcatttgcagtttaaagccactggcaaagtgacaagtagagatgttattccactacgtaccaaacagtatattgttaccatcttttaagtacacccttgattaaggtgggataggttaaagttagtggcataatggccaggtgcggtggctcacgcctgtaatcccagcactttgggaggccgaggtgggcggatcacaaggtcaggagattgaccatcccggctaacacagtgaaaccccatctctactaaaaatacaaaaaaattagccgggcatggtggcgggtgcctgtagtcccagctactcaggaagctgaggcaggagaatggtgtgaacctgggaggtggaggttgcagtgagccgagatcgtgccacagcactccagcctgggtgaaagaccgagactccatctcaaaaaaaaagaaaaaaagttagtggcataataatgcttcattaaacgcagaatagtcttaacatggtataaaaaatgaaattaagttcacacatcatctaacaatttttaaatatactgcattcgattacataaaagtacagttagtaaaataatattctcatttaatacttttaactgtaatttttctcactataatgtagaaaactattactctgaacccccactttttaaaaatctttattaataaagtaattcattataatttttgaaaaaaaaagttttaaaatggtctgccaacatgttaatgtaggttaggccatccaaaagacaaagcaaaacatcaacattaagtcataggctaggattatacaaatgagaacccccaccttatacattacttaatataagttaactacaaagagcctctccacttacatttttatcatgcatcttacattttaatgtccttattcttttatagaaaaggtcataatacccaataaaaaagaatctgtaatatccctgatgcagcaacaattgatcacatgctttcacatgtgaccacaataggaataaaataacagcgtaaagaaatttgaaagttgtattacatcattattcactgttcaaaaatttttttcaagaaacaagtacactttcaatgaaattacaatgcttcagaaaatctcccttttaaagttatatacaaaaacagctttagttgtggattcatttttatactcaatactctgatttagtgtaatgtctgaagtgtcagtgccttattctagtgtaaattctcatatttacgtaaaatcaattttgaattaaatatttttttcatatttacatctgcaaaaatatactttagtataaactctctgatgttttctaagctatagattttgaaaaaaaaagtctttccaaattcattatatttgcaggactcttctccaatataaattccatgttgttgaataaagctggagcaactgcttcaggttttcctctagtacacaatgtgtgcaacaagatctgtgatacaagtaaaggtactacaacccccccttatatttgtaatagctgatttcagaataaatattcttctttaaaggcttatattttctgaaagattttttgacagtaattgcacttttattgcttttattaactatgaaccttctgttgagatgtgagtgggcgttaatggcgtttccatattctttatatctgtacgatttttctcaaggataaaagctttcctgtgaaataaggtgtaagcactcaaaagttttgccacattcttcacacttgtaggagttttggcagcattaattctcttacctacaatcaagtgtggcaaccatataaacgctttgtctcatttcatacatttccagggtttcacattagtataatttatttttatgtatacaaaagttggaggtggtggtaaaagcactgttgcatctttcaggtttgtagagttcctcttcagcatgaattatcgccatgtctcttaagaattgagaacttgtggctgggcgtcgtggctcatgcctgtcatctcagcactttaggatgccgaggtgggtggaccatctgaggtcaggagttggagaccagtctggcaaacatgatgaaaccccatctctactaaaaatacaaaaattagctgggcatggtggtgggcaccagtaatcccagctactcgggaggctgaggcaggagaatggcttgataccaggaggcagaagttgcagtgagctgagatcgtgccattgcactccagcctgggtgacaagagtgaaactccatctcaaaaaacaaaaagagttgacaggttgttataggctttgccatattcttcacacttgtagggtttctgtccagtataaattatgtgtaataagggttgagaacttccttaaaaagctttgtcacattctttatatttgtagggtttatgttccatataaattctcatatttagtcagagtccagggctagttaaaggctttcccacattcatcacattcatacggtttctctccagtatgaattatcttatgcttattaagggttgaggaacatttaaaagattttccacattcttcactatgcagggtttctgtctaatatgaattttcttatgtttattaagggctgaggaccagttaaaagctttgccacattcttcacatttgtacggtttctctccagtatgaattatcttatgttcagttagagttgagaatgcagtaaaggctttgccacattcttcacacttgtagggtttctctccagtatgagctctcttatgtttagagaggcttgagtaccaggtaaaggttttgccacattcgtcacatttgtagggtacatctccagtatgaattctcttatgtttagtaaggtttgaggaacggttaaaagctttgccacattcctcacatttgtagggtttctctccagtatgaattatctcatgtttagtaagggttgaggatgaaataaaggctttgccacatttatcacacttgtatggtttctctccagtatgaattttcttatgtgaaaaaagggttgcagggtggttaaaagctttgccacattctctacatctgtagggtttctctccagtatgaattatcttatgtgtagtaaggttacaggactgcttataggctttgccacattcttcacatttgtagggtttctctccagtatgaattttcttatgtgtagtaaggtgtgaggactgcttataggctttaccacattcttcacatttatagcgtttctctccagcatcaattttcttatatgtagtacgggttgaagactggttaaaagttttcccatattctatacatttaaaagatttttttccagtatctcttatcttatgtttgtttgaatttgaaaatttatgcaagaatttcacatattcatcacattgaaatatttttctctgggtagttgccaaacattgtttaagtccattataacctcttttgtgcactggacactcatctacactttcacagcctttttttaactgtaaattgtcatgtctacatttttcatatcttcttagtatcactttttggaaagaatcttttatgctctgctctgaccaaaggtcttgggcaaaatgagaatacataactgaaagaaacaataaaaacacatgacttcaattgctagactcagataaatatacttcacaaatctaacctataaaattatacaaactacgtaagcaagatgacacagcaaaataccacaagctgtaatttcttcctggatatataactgtaacaaaaacatactgaccaaaatacatttgtaaaaaatttataaattagttaagtgtgtaaagggctccaggtgagcacaatgcaaagagccacatagaaaaatagaaaaaaagaaaagtctgttacttatacccaacacagctcttcctgctctccagtataacattgtgcctttaaaagtaaattgcgggcccggtgtggtagctcacacccgtgaccccagcactccgggaggctgaggcaggtggatcatgaggtcaacagttcaagaccagcctggcaaagatggtgaaaccccgtctctacaaaactacaaaacgttagccaggtgtggtaacagatacctgtaatccagttacttgggaggctgagggaggagaattgcttgaactgtggaggcagagattgtagtgagccaagatcatgccattgtactccagcctaggtaacagagtgagactctgtctcacacatgcacacaaatatgtaaattgccaacccctggtttcttttttaaaaaacaagaaaagtattggcacatacatctttatttctggattctaggggcttttttatttttattttttattttatttatttatttattttgaggtagagtctcgctctgtctcccaggctggagtgcagtggcgcaatctcggctcactgcaagctccgcctcccgggttcacgccattctcctgccacagcctcccaactagatgggactacaggtgcccgccaccatgcccggctaattttttgtatttttagtagagatggagtttcaccgtgttagccaggatagtctcaatctcctgacctcgtgatccgcccgcctcggcctaccaaagtgctgggattacaggcatgaaccaccgtgcccggcctctaggggctttttaaaatactggttaatgtctcccacgacatgaaatggtaatatacgttggaatgacactttgagtctaaaggtaaatgtttcagaagcaaagaaactgcagtatcccaaacacggaatgggtgtagcaagtgattactgatttattaagaagaaataagaataagccgatttaactaaacaacacaaaattttagacaagacacatcctaaaaatatgtttgagaaattccaagaatcgctatccaagacgattgattttcagactatgcgaggacagagctatattataaaaatcataacaggtagctttttgttcatgtccaaatctcaaagattacaatgtatacaaaatattagggcaacatggccccatcaaaaaaattataaaattttcaaaagcaacaataaaaagtgtataatttttaaaattccaaataaattgaacaggccaggcttggtggctcattcctgtaatcccaacacactgggaggccaaggtggggaaatcagatgaggtcaggagtttgagaccagcctggccaacatggtgaaaccctgtctctactaaaaatacaaaaaattagctagccgtgttgacaggcacctgtaatcccagctattcagggggctgaggcaggagtattgcttgaatgtgggaggcggaggttgcagtgagctgagattacgccactgcactccagggcgagactccgtctcaggaaaaaaaaaaaaaaaaaaacaaataaaataaatttaattttcacaaagtgaaacaggaacacagacaactactgaagattagaaaaacgaggataacaacgaaaaaatattaaaatagaaaacaaaaattgtgggtgtaaaaaatacaaaaactaagtgaaaaatttcttaaaagaaaaaattgtgtaaatagggcaaagctgaaaagctgaacaaacaaactaggatatacccaaacatctatttataacaaacacatatataaacaaaattccaaaaatcacagataagaagagaattttgggagctgcaagataaaaatgatggtcatttataagcatagtcttatgagataaccaataaattgatcaaaaacatttttgtaggtcaaaaggaaactgtgatattgttattaaagttataataaaaaaagatgtcaagtgggaatagtaccatcaccaaaattgtactaccaaataaaaagaagtccttccaaaataaccaaatcctgagaaagtatattggcactgcatatgccctacatatcaaggatgctgaaaggagtttttttccacagaaaataacataatgcaagaaaacaacacataatcatctgaagatatgtaagtttctggaaaagataggcacattcataaaaatggaatttcttacttaactaatgttaattagttatgttaatcataatggtacagtttaaaagataaaagtatggaaattatgaacatctgttaatgaatagacaacataaaaaatataattagtaaaatcaataacaaatgtgaaggtagatgtaataatgaggaatttctgtatgcaactgaagttaattttttactacattaaaatatattgttggatcttttagaggttttagataatcccccaaggtactactaagaaaatatccgaggccaggcacggtggctcacgcctgtaatcccagcactttgggaggccgaggcgggcggatcacaaggtcaggagatggagaccatcctggctaacacggtgaaaccccgtctctattaaaaatacaaaaaaaaaaaaattagccgggtgtagaggtgggcgccggtagttccagctactcgagaggctgaggcagaagaatggtgtgaacccgggaggcggagcttacagtgagccaagatcgcgccagggcactccagcctgggcgacagagcgagactccgtctcaaaaaaaaaaaaaaaaaaaaaagaaaatatccgtatagatacacaaaagaaaataagaaaaaagctcaaagcatgtcaacacaaaaataaaaaaaacttaaaaaggagaaattaagacacaaagatacaagaatcaaaacaattattttattaacagtaagtttttctctttcagaaaactatttaaatataattatctttccaatcaagagacatacttctaaaaaggctcattaaaaaattttaaaaatcaagactcaacttgcctttttacaagagtcagctgagatctaatgataagaaaagactgaaagtggcaagaccaagtagaaatttcatgtaaatactaacaaaatgagagcagaagaggtcaaaataatattacacaagctacattgttaaagtcaaaagctgtcatattttataaaatgtactttaagttaaaacttcaaaaaagaaggacattaaacaatatatagattaattcatggaaacctatgacaaatttgtttatccatgtgtgtatttgtgcgtgtgtgtgtctcaaattggggtttcaaatatataaagcaaatactaacaaagttgaatagagcaatataattatagtaggatatttcaataccccactttctgtaataataataaaacaagacagtatattagtaagggaacagaggactagaaggcagtaaaaaacaattatttctaatgaaggtatagagaacactcctcaacatcatcaggatacatagccttctcaatagctcataaaacattcctctttatagaccacctgttaggtcaaaaacaaagtcttaacacatttttttaaactaaaatttcatagattactttctatgacaaaaatggaattagagtataagacaataatataaataattgataaattttcaaatatatagaaatgatacaatacactcttgagcatgcacttgttgaaataaacttggctgggtgcggtggctcatgcctgttaccccagcactttgggaggccgaggcgggtgaatttaactccatctcaaaaacaatcaaaaaggaaataattaatattgtgaagatgtctataccgctcaatttaacctatagatttaatgcaatatttttcaaatttctcattgtatttttgaagaaataaaaacagcaaatccaaaactatatggaatctaaaaagacaaagtacccaacagtcttcaaaaaaaaaaaaaaatgttggaggcattacaatttctgatttcaaaacacatcaaaaagctacagaattaaaacaatttggtatgagcataaagatgaaaaagtagactaataaaacagaatgcagcacatgtattatatcacctttcacataattactgcagcattgctaccgaaagccaacaggtaaaagcaatgcaaatttctgtcaccaaatcagtagatataaaaatactggcatatcactcagttttcaaaaagaaaatattctaacaactattaagataaatattgatgacattatgcaaaataaaacgagccagccacaaaaagacagagactgtatgagatatataaagcagttatatgcttagaaaccgaagagtggtgttttaaaagtgctaggaaatgtgaagaattggtagttgtttaatgtgtattgagatttagctttgcaagataaaaatattctagtgatatgttgcataatatgtcaacataattaatataactaaacagaatatatatatatatatatatatttatatatattattttttttcgagatggagtctcactctgtctccgaggccggagtacagtggcaagatatcggctcactgcaatctccgcctcccaggttcaagcaattcccctgcgtcaccctcctgagtagctgggactacaggcatgcgccaccatacctggctaattttttgtattttagtagagacagggtttccccatgttggccaggatagtctccatctcctgacctcatgatccgcctgccttggcctcccgaagtgctgggactacaggtgtgagccactgcgcctggcctagaaatattttattataaattttcttatgtgtttttgacagataacacattttgttatgtgtttcccccacacaaaaataatatagattcataaataaatagatgttgaaattaggagaatttttatgactactcacgtagacaggattaaaaacctgtttcaggctgggagcggtggctcgcacctgtaatcccaacactaggggaggccgaggcaggcggatcacctgaggtcaggagtttgagaccagcctgaccaacatggtaaaaccccgtctctactaaaaatagaaaattagccaggtatggtggcgcatgcctatagtcccagctactcaggagggtgaggcaggagaatcacttgaacccggaaggtggaggttgcagtaagctaagattatgccattgtactccagcctgggcaacaagagcaaaactcccttttaaaaaaaataaaaaaagaaaagaaaacaaaacaaaacaaaaaaaacctggccgggtgccgtggctcacgcccataatcccagccctttgggaggccaaggcgggtggattgcctgaggtcaggagttcaagatcagcctgacaaacaaacatggtgaaaactcacctctactaaaaatacaaaaattagccaggcatggtggtgcacacctgtagttccagctactcagaaagctaaggcagaagaatcgcttgaacccaggaggtggaggttgcagtgagccaaaatcatgccactgcactccaacatgggcaacagaacgagaatccatctcaaaaaaaaaaaaagacgggcatggaggcttgagcctgtttaatcccagcactttgggaggctcaggagggtagatcacctgaggtcaagagtttgagatcagcatggccaacatggtgaaaccccatctcgactaaaaatacacaaattagccggctgtggtggcgggtgcttgtagtcccagctactcgggaggctgtggcagaagaatctcttgtacccaggaggcggaggttgcagtgagccgagatcgcaccactgcaatccagcctgggtgacagagtgagactctgtctcaaaaaaaaaagagaaacctactctgaaaaagcacactaatgtggaacttcaaaacaataataagagaaatgtttactcataaaatctggtatgcaacattgatgtatcatttaaacaaacattgttaggccagccaggcgcagtggctcacatctgtaatctcagcactatgggaggccgaggcgggcagatcacctgaggtcaggagttcaaagaccagcctgaccaacatggtgaaaccccatctctactaaaaacagaaaaattagccgcgcatggtgacacatgcctgtaattgcagctacttgggaggctgaggcatgagaactgcttgaagccaggaggtggaggttgaggtgagccaagatcgcaccactgcactccagtctgggtgacagagagtgactctatctcaaaaaaaaaaaaaaaaaaaattgtctacgtaactgcaatatttagctgttactgtgtactcattaaatgcaggtattttgaatcactggcatgcactgtgtggcagtaaaatttcagagaatatatgcagtgtaattatacacagaagattctgagaaatttttaataaataaccatttaaaagaaactagttactttttatgttttaaatatcttcttacacaaaatgaaattgctataatccaactttagaagaaaagaatagacatattgttaaataaaaaatatatatattttgcagaatagggttagaccctctgatatgtaaaacaagtattaggaaataaactacattattatttagatataggctgaagaaagttgatgaaaattctgtaattcccttttgcctgcagcaaacttgaatttacaagtaactattttagtaaatatggagtacctactaattatccaatttacttcaggcataccatgcaaattctagcacactgtcctaaatttctgaatctaaaattatgacaaatttgaaatagaaaacagaaagtaaaaatgtatagggagagtgacctcactaagatgaaaagattaaaagtcccctattttcatatcctcttacagcaaaaaaaggttagctatccctgacaaaaatgcctttatgagaaaaccaggcattatggctcacacctgtaatgacagcttcatggtacattaaggtaggagaactgcttcaggccaggattttgagaccagtctgcgttatgtagcaagaccccatctccaaaataagtgcctgtaagatttgagatccagggagggagttgtgaaatgctgttaaagcttaagattgagaagtgttctattcagaaggcaggccctcattcaggtgggaaactacaagacccctggttcttggctacagaccaggatagggttcacccaacttggtcccactgagaattctgaacttactctctaactatccgaaactcctcccggccacagtctggcagaggtcctgccattccagagacctggaggaaggtgcccatttacagccacgtaggcaggcctgcagaccttggcctttactgtggtccctggaacagttcaatgactcagtttcatttacctgtgccacagtttatggtcagttctgcctacatagaaacccacccagttacctgaggaaatgctctctggtacacagtgaaagccacactcatccacatcctgatacaacgcccaccatatgcagaaccgtgtgcaaaaacatgtcctaatgtctgccctatggagcaaagtcctgaaggatatgcagtctgtccaaaaataaaatgggaattacaactacccaagtccctgtatcaagccaactaaaggtgaaccctagtgcagacccagcagccttgtgaccaagctacaacccctcttcactacaaattcagagggaatctcatcacactaagggcccaataaaagattttttactttctaaaattagtttatgaaaacttgaagaggtgttttgttttctccatcaaattcagacaccaatacaaaactatattgcgcccattgtcagtgcttctattttaatctaggactggaagtatgtggcagaagaattaatgaaataaatatataaatccattgaaatagaaaaataagtaaaatgctgtttgtagatcatacaatcttatttttaaaaaaaccaaacacagtacttttacatttgctgaggtgtggtttacttccaactatattgtcaattttgtcaattttgtccattcaggacataggcatgggcaaggacttcatgactaaaacaccaaaagcaacaaaagccaaaatagacaaatgggatctaataaaactaaagagcttctgcacagcaaaagaaacaaccatcagaatgaacaggcaacctacagaatgggagaaaatttttgcaatctacccatctgacaaagggctaatatccagaatctacaaagaacttaaacaaatttacaagaaaaaaaacaaccccaccaaaaagtgggcaaaggatatgaacagacatttctcaaaagaagacatttatgcagccaacagacacatgaaaaaatgttcatcatcactggtcatcagagaaatgcaaatcaaaaccacaatgagataccatctcacatcagttagaatggcaatcattaaaaagtcaggaaacaacagatgctagagaggatgtggagaaacaggaacgcttttacactgttggcgggagtgtaaactagttcaaccattgtggaagacagtgtggcgattcttcaaggatctagaactagaaataccatttgatccagtgatcccattactgggtatatacccaaaggattataagtcatgctactataaagacacatgcacacgtatgtttattgcggcactactcacaatagcaaagacttggaaccaacccaaatgtccatcaatgacagactggattaagaaaatgtggcacatattcaccatggaatactatgcagccacaaaaaaggatgagttcatgtcctttgcagggacatggatgaagctggaaaccatcattctgagcaaactatcacaaggacagaaaaccaaacaccccatgttctcactcataggtgggaattgaacaatgagaacacctggacacagggcagggaacatcacacaccggggcctgtcatggggtggggggatgggggagggatagcattaggagagatacctaatgtaaatgacgagttaatgggtgcagcaaaccaacatggcacatgtatacctatgtaacaaacatgcatgatgtgcacatgtaccctagaacttaaaagtgtaattaaaaaaacccatacacagtacattaaaacctgtctaaaccaataaatacactaattaaattaggaaaatataaaattaacataaaagtatatctatggtttcatacagtttaactatctgataaaataaagaaaaaatcttatttactataacattaaataataaatttctgaggaaaaaattaaccaaggaggtaatacaaaaaaaaagaatgaaacaattggagaagatccaagtaaattttaaaatagtttatgtctatggattgaaagattaaatattactgaagtgccatattatccaaagtgatctacagattcaatgaacttcctattaaaattgcagtgtttttttttcacagtaatcaaaaatacaattctaaaatttacatgaaactaaaataaactttgactagccaaagcaatcatgaggaaaaagaacaaagcagaaggatatcatacttaaaatttcaaactatacatttcaagactatatagtaataaaacagaaaaatgaacaaaaaaatggaacagaaactaatactttcacacacacatttaagacctgatgcaaaaagagaacttaaagagttttagtttctcaaaatcatgcagatacttgtgtgtccccaaaacaatggaaaaacagccagattgtgcagtctcttatctgtcatgaagaggactttggctctcagtgtgaacttgaaggaagctcaccgaaagaaaaatagaattcttagagaattgaaaagcataagacagaagatgcctctttgtgagagcaaaattaaaagaaaaaagaaaagaaaagaaaaaaaaagctgcccaggaactatttccttgggaacacagcttcccaaatcacattttaaggactcgctttctctttgaccttgggacctctatctgtgttgtctgtcctattcattttcactcgcacctacctgggggtttggcaatcatctcatgcctcttcatagttaaaggtttttttccttgctccagacaggtgatcaggtttggtttagagacaacaatacctgttttattaagaataaataatatgaatcttgctcatattctccaattacaagctagtactgtgctcagcagagaggatgtgataaagtattctagtaaattaatactaaaatactaagttataacagaaattttttttcttttttgaggcagagtttcactcttgttgcccaggctggagtgcaatggctcgatcttggctcaccacaagctccaactccaggattcaagcggttctcctgtctcagcctcctgagtagctgggattacaggcatgtgccaccacgcccgactaatttttgcgtttttagtacagacagggtttcaccatgttggtcaggctggtctcgaactcctgacctcaggtgatccacccgcccggactcccaaagtgctgggattataggtgtgagccaccaagcctggcctataacagaaatttctaaatatttagaaaatactttcaatttgtaggtttcttaattttactactgggttctactaaatcaaaaattggtggtggcaattagattttcaggtgggggcaacaatattttatgccactaaatttttggaattaccactaatttggagtgaagaacacagctcaactcaggaatgtggaaagtttggattaagatgaaacatcatgaagaaattcttttctaaatgaaaaaattctgaagatttttctggaaaaaggagatctgaaactcttgtatgcaaagaataaattactaaaaaacattctacaaaaaagagaaataaaacctttagagtaatattatgaattatgtactcaagttatcctcaccaaggaagatcaggtttctgtagttctctaacatcacatccctatatagattccgctgtgcagcgtccaggcaatgccactcctccagagagaattctatggccacatctctaaattgcaatggtccctgaaaaaaacacacacacttatttttaccaagtggccatgggtggaatttttaatttgacttcaggtgaaatgagagagtaaagagaagtggttctgacttataggactaaaattatccaataaaatgattttcaacacagaaatattctctaatgtattctctaactctgagaagaaagagcagcacaagatccacaacatcagttcacatatgatatttttctagataataaagtataaaattacggccatgaacacgaacatgtacatttttgagtggtatatttacatcatacggaatgagcagtgaatatttttcagatagaaaagaaatgttgggttagaaggcacctctcaaattttaatatgtacaataagctgacgaccttgttatgcaggtttttttttccagaagatctgaaataaagtctttcttatttatttatttatttatagatggagtttcgctcttgttgcccaggctggagtgcaatggcgccatcttggcttactggaaacaccgcctcctgggtacaagcaattctcctgcctcagcctcccgagtagctgggattagtcatgcgccaccatgcccagctaatttttttttgtatttttagtagagatggggtttctccatgttggtcaggctgctcttgaactcccaacctcaggtgatccgctgcttcagcctcccaaagtgctgggattataggcgtgagccaccgcgcccggtcaattttttgaatttctaacaagctcaccagtaatgccaatgtttttggccccaaaaggatattttttcaaacatttagtaagtggaagagcctgtgttttcccccacattttctagcctataaacaaagagccctcatttatcaaagaaaatatgtaggaaaaaaataagaaaggacagctgccagattaaatgtgatggtttatgcacatcagctgcataaagatacttaataataaaaataactctatagtgaaaaaaatctctcagggagctacttaaccaagtgaatcattaaccactttttttttttttttttttttttttttttttttgagacggagtctcgctaggtcgcccaggccggagtgcagtggcgcgatctcggctcactgcaagctccgcctcccgggttcacaccattctcctgcctcagcctcccgagtagctgggactacaggcacccgccaccaggcccggctaattttttatatttttagtagagacggggtttcaccatgttagccaggatggtctcgatttcctgacctcgtgatccgcccgcctcggcctcccaaagtgctgggattacaggcgtgagccactctgcccagccaatcattaaccattaactgcactaggacaaatttttatgatatgctaatgctcacagaagaacacagcatcactgttgaaatactccccccaaaaaagtaaattatagtctgaatttaaccataaagaaacatcagttttaggccaggcgcagtgactcacgcctgtaatcccagcactttgggaggcacgaggtgggcggatcacgaggtcatgagttcgagaccagcctgactaacagggtgaaacctcatctctacaaaatacaaaaattagccgggcgtggtggcgggcacctgtaatcccagctacttgggaggctaaggcaggagaattgtttgaccccgggaggtgaagtttgcactgagccaagatcgcgctactatacccctggccttggtgacacagcgagactctgtctcaaaaaaaaaaaaaaaaaaaagaaacatgttttatgcaaactttaaaatacagattactcctctgttctgtaatttttagtagtaattttaagtaggcttcacttagctccctagagagcaggtatctcttaataatttttttcagaactttctgggtaataaatgccatctcatttaaataagcattttcttaatctcgttctgcatagagctaatagaacacacagatggagcctcaacattacatgttctccatctttactaaggaccagagttttacccaatagaaatcttgagtatccacatctttccatgttcaacagccacaaaggaaacatttttaatattgcagattataaattattgctgagaatcctgcatagcatataagaagctatgatgcagagaataaagagaaggctctgagatacaggaaagaaatatttttcagagacccttgactatcataagaattttaacaagtagttaaaccaaacttattagggcagaaaaacacaagtagagaagtaaagttttgtaagtactaaacacaaggcagtccaggaagcagagtggacacagctcttcatctgatgcatgtttacctgaaggggaagttattttttttcttcctccttcttctctggaattcattctcagatgagactctctgaataaattacatctgcatcttgagaatatgctttaaaggtgtcagtattacatgtttacctgatagcatgacatcaattggcagaaaaacaaaaggttaacccatttctgtcctttaaaacagaagagattcaggaacaatgagctgctccatgaaaataagaatgtttctcctttcctgtccccaggtgccctcccctgccacagacaccagcaatttctgctacagtaatggaaatatgtgccacactgacctgtccctaccaagtcaaaacagaataggccctgtgaccatcctttagtgcaaaggtggaacttaactctcatgaatgtattttgaagccctcatacctgattctggcctcaccttagagtcatatgaggcacttcattaaacaacatggatgcttccacacacaacaataaacagaagctgtggggagggcacaagagatttctgcaaattggccatgagatcctaatgagaagcctgggctgataaccactaagctaagcattgcctctcaagctttaacgagcttataaatcacttggtaattttggccccactttatgtagtgtgattttgcaggtttgaaaagggtccatgaatgggtgttttaaacaagttccctgtcaatgcggatgttgctcccccttagctcattattagcattagttacagaagcaggaacaacacagggtcccttacactcagcactcttgtcacaaccaaatacttctggtacagataaggacaacccatctccatcctaaagttttatattctttgctggttctttacagacaaaacagaaggcagcaatgtctgagtaagtcttgatttaaaaagcaacatgtacacatttactaatgcaatgtttattaagcaggtactatgtgctcaagagtatgatacagagcactatgctgggtattctcataacatcctgggagctggcactaagggtttaataatttccaggatgtagttaaaggtcccagcatttttatttcttctatttatcggtcatcaaaatttttttaaaaattgtatagaataaaagctaaatatagacagatggaagagatatagaaggaagagtttaatgtattatagagataattttattctattcatatttacttttttgtgacttatggagcaactactggatctgcaggaatagaaaacaagttgctaattagaatgtttctgcaagcattggttttaatacaacatttaaaaactaagaccctaaaatacatactttatttttctcatttatatgcttttgggtttcagaaaattgtgagcaccagctctagaaatgcagtaggatttaccagccaaaactctgatctcttctaatcagttctgtgaggcaagactccatggtagggtcagaactaaatagtctccaaaaagggtgaatctgaataggtctggggcagggtgaagacactatgtagaattctgttctctatgccactggggtacttccagttttgtttttcctaagcttacctaaaagaaatgtaaatccagagtttctgcaattttaatcttttctagccactgccctgtcaactttatactatatactaatatgcaatttaaacaaatcccttaaggtcttctagagtaactttttttgttttgagatgcagtctcactctgtcacctaggctggagtgcactggtgcgatctcggctcactgcaacctctgcctcccagattcaagtgaatcttctgcctcagcctcccaagtagctagaactacaggtgtgcatcaccatgcctggctaattttggtattattagtagagatggcatttcaccatattggccaggctagtctcaaactcctgacctcatgattcgcctgccttgacctctcaagtgctgggaatacaggcatgagccactgtgcctggcctttctagggtaattttattagaaaataaatacgtacacttaaagaaaaagaaatagaaattatactgctgggtgtagtgtctcacgcatgtaatcccagcactttggtaggccgaggtgggtggatcgcgaggtcaggagttcaagaccagcctgaccaagatggtgaaaccccatctctgctaaaaatacaaaaattagccggatgcgatggcaggcacatgtaatcccagctactcaggaggctgaggcagtaggctcacttgaatcagggtggcagaggttgcagtgagctgagattacaccattgcactccctctcaaaaatataaaaaaaaggaaattataataacggttcttctcttcataaatatgccttcagatgtagacatcagaagccacaacaatataaagtggcctaaataaagcccaagattttagacacattgtatttgttgtaccaaccatatgatgcacaattcaattatttatccagctgctagtctagactaaaagtttctggattgtaggaaccatgactgcttcatgtttttttttttttaaatggctatatgaaatggaagctactagtttatctatttgggtctccagatctcctccttgtttatcatccaagtaccaggaaactggagaaactctcatctgggtaccaaccaaagacatctcttgtatgaggggatgaacaaacacagatgactcatttctcttacactgagacagaagcagaattaactcctgtcagcctgacacaattctgcatgggacatctcaaatgcctcaaagacacctaggtgattttgaaggaattcccagtcaccctgggccgctggcccaatgataagccaggctggagagactcaggctgattctaaatagaaaatggaacttccctggtggaactccacaacctggatcacccattctgatttactagctcttgggtaagagaaagaacaaaaatactctactccagtatcacattttacaggtgaatatagttgtggttgtgatcatggctctggatactttgcagccttgatctctcactacagattatgccatcacattctatttcctcctggagcctctgacctcactgtagcaggtcaatgaacaagatgtgaaacatctcaaagagccacactcccaatgcagaaaatgccttttgttagttttctgtacattctctatccaaagtctggcccttttttatctgcagattctaggtaggatcaacttggctctgtatcctttggtgttacagtaagtggagtacaattaaaggagaaatcttaagaaaaagctcagattagatatgagattgatcaagtcagccagaaaatattcccctaaaagcaatttctctctcaacacccaaagtacacagctactctcagcatgagaaacatgaacattatggagaaagggggcagattttcagaatacttttataaagtttcttttccatctctgctgctctctcatctcctagccattgaataggggttctatatttaaatacatctgacaacttccaacaacactttttgatgaagaaatagaatctgactgtgttcatatagtggaatacattagagcttgcaatataactaactaaagagctatgttggtggtgtttgggtggccacatcacctgtctttatttgtcctgtaatagcagcattccaatttagtgaaataaaagatactaaaattgtgtttactcataattatccctattgaataaagtaataaacatgtcagactaatatctactataacaatttggtagtaaattttctttggatattagatataaatatctaagcattaataattttaatgaactagtcataatgtatgtagcatttttaaaaattgcaactatatttcaattaaaacttttacactttcaaaagtgtaaataatattaaaataaccatttaagtgaaaaggaatgcttatactctgctggtaggagtgtaaattagttcaacaactataaaaagcagtgtggtgattcctcagagaactaaaaacaattatcatttgacccaggaacctcataattgggtatatacccaaagaaatataaattatattataaagacacatccacatgcatgttcattgcagcactattcacaatagcaaagacacgcacaggctgtaaatgcctatcaatggtagactggataaagaaaatatggtatggtcagatgcagtggctcatgcctgtaatcccagcactttgggaggacaaggcatgtagactgcctgagcttagaagtttgagaccagcctggcaacatggcaaaatcttgtctccacagaaaatacaaagagaaaaactggccaggtgtggtaacgcccgcatgtagtcccagctacttgggaggatgagataggagagatttgcttgagcctgggaagttgaggctaaagtaatccaatatcatgccatggcactttagtctgggcaataagtgagaccctgtctccaaaaataaaataaaataaaataaaagatttagtaaaaacaaaatatggtacatcatggagtactctgtggccactaaaaaaaaagatcatgtcctttgcaataacactgatgaagctggagaccattattcttagaaaacaaatgcagaggctgcgtgtgattgcttatacctgtaatcccagcactgtgggaggccaaggggggtggatcacatgaggtgcggagtttgagaccagcctgaccaacatggagaaaccccgtatctactaaagatacaaaattatccggggttggtggcacgtgcctgtaattccagctactcgggagactgaggcaggagaattgcttgaacccaggaggtggaggttgcagtgagccgagatcacaccattgcacaccaccctgggcagcaagtgcaaaactccatctcaaaataataataataataataataataatgcagaaacagaaaaccaaatgcatgttattatttataagtaagagctaaataataacaacacatgaacacaaagaggagaacaaaagacactgaggcctagttgagggtggaggatggaaggactaagaggttcagaaaacatacctgtttggtgctatgggtagtatctcagtgacaaagtaatctgcacaccaaacctccatgacataattttagctgtgtaacaaacctacatgtgtaccctgaaccaaaaataaaggtaaaagaaaaaaaaaaatccctgggtgggagagagtgcaatgtaggtgagaggactgatttttggtacagatagtggtcccagtggggctgtactctatttatttccgtgtgcatgcaggcaggtgagattatgaacagctggtccaaaatgctaggatggtggagaaaacaggttgctgctgcagattcagtgtctgtgagtgggaatatgctaggagacttgtagagacttgtggattcttggcaagaaacactaggatcaaaaatgccattgtgggccgggcgctgtggctcatgcctgtaatcccagcactttggaaggctgaggcaggaggatcacgaggtcaggagatcgagaccatcctggctaacatggtgaaaccccatctctactaaaaatacaaaaaaaaattagccaggcgtggtggcgggcacctgtagtcccagctactcaggaggctgagacaggagaatggcgtgaacccgggaggcggagcctgcagtgagccgagatcgcgccactgcactccagcctgggcaacacagcgagactccatctcaaaaacaaaacaaaacaaaaacaaaaacaaaaaataccattgtgaggttcctgagggtggtgccgagtcccgggaggagtgtggacatgtcaatgtctagtgtgtgtgttcgtgagtgggtgggaatcctgtggtggcagctgtgggaaaagggggtctgtcatcagagcttctttcctctacattttcagtcctctgtcaccctgagagaagacctgggatcacaggacaacgggcagtgtgacagcctgtgtacgacagagcagagcctcccattcccaatcacccaaagttttattccaggccaggcctccgtggtatcttttttctggcaccatatctgtagagtctgctgaacatcaaacaattctccaacactaacttattgtctcacatttgaattctgacagcacccagagtcatcgtagaccctgattcagggctcagtcccgcaacattgtcctcatggcagatgccagtcacaaaccccaagggcccatctatgcttctgagctactgtttaaaacctggggagtcccataacctctctgaagttcaataatttggtagagctactcacagaatcatcaaaatactgtagttatctttactggtttaatatataagatgcagccctggaaaagccaaatggaagaaatgcacagaacaaagaaaagagatggggaaagatgaaacacatagataatcctggaaaatttttctgattaataaaattctccatcctttgtgtgctccaggaacagtttatggaaagaaacacccttcccattatgagttagatggtgctctcttttcttacctatcacacagccagacacacactctgcacattttctctttctcattaaaaaaaaatcagctgaatttgttttcagtggtcataatgaaatatttcttttcttttcttttctttttttttttgagccagagtctcactctgtcgcccaggctggagtgcagtggcactatcctggctcactgcaaccgctgcctcccaggttcaagccattctcctccctcagcttcccgagtcgctgggattacaggtgcccaccaccacacccagctaatttttgttttttcggtggtgtttttgagatggagtcttgctctgctgcccaggctgaagtgcagtggtgcgatctcagctcactgcaagctccatctcccgggttcacaccattctcctgcctcagcctccccagtagctgggactacaggcacctgccaccacgcctggctaatttttttgtatttgtagtagagacagggtttcaccctgttagccaggatggtctcgatctcctgacctcgtgattcacccgccttggcctcccaaagtgctgggattacaggcttgagccactgcgcctgacttgtgttttttaaaatagagacagggtttctccatgttgctcaggctggtcgcgtactcccaacctcaggtgatctgctcaactcggcctccacaggctgagtgctgggattacaggcgtgagccaccagcctggcctaaaataaaatatttcctttttttttttttttttttttttttttgaggggagttttgctcttgttgcccaggctggagtgcaacggcgccgtcttggctcactgcaacctccacctcccagtgggattacaggcatgtaagcctgcaacaggcagcaccacgcctgcctaattttttttgtatttttagtagagacagggtttcttcatattggtcaggctggtctgaaacccctgacctcaggtgatccacctgcctcggcttcccaacttgctgggattacatgtgtgagccaccacgcccagccaaataaaatatttcttaatcaaacttaagtttatctccctcccttgggctcctgaactttgagctaccctcagtctgagtcaacatacaaccccattttatgtccctcctaagaacatgctgatttcagtgtaaaacattctctgatctaagatctgactttttcaccctccatttgccattcccctcccacctcctttctaatcttgtttgcacctccctaggaaagaaagtgtttttctgcctacacctttgcaagccataaagatcttatagttagttggtatttcctctcgttgcaatacttttttagaattttttttacgtaaatctgattttttttttttttacaaagtctagaaagtacctcaaaacaataacaacttcatcatcagtaagactctctcagtttcctttcatcttaacctcaactgcatctgcctgtggatccccagctttccagggctctgtggcttctctcagaataaaggcttcttctatggctggggtgagcaggctgagacagctgcaggggtggctcctcagaaagaactaactgggcctttaataacttcctctcgcatgcttaacattagccttagcttggagtcactaggttcaagctttaatttccatgtcagagttattcacttggtttttgaaactgtttcaatagtcctgtgaaattactcaaacacagtgtttacgtaagggaaggaaattttaaggtgctttttttttttttttttgagacggtcttgctctgtcaccaggctgcaatgcaatggcccgatctcaggtcactgcaacctctgcctcccgggttcaagccactctcctgcctcagcctcccaagtagctgggactacaggcatgtgccaccacacctggctaatttttgtatttttagcagagacagggtttcaccatgttgagcaggctggtcttgaactcctgacctcaagtgatcaacccccctcggcctcccaaagtgctgggattacaggcatgagccaccacacctggctaaggtgcttgcattttataccttcataagaaaagcaaatatatctacttctttcagacaacgtattattttattatttatattaaaaacaatgtagtaaaaaattagtcatatgggaacacttctagaaggtaccacatttcatcacatataatttagcattaaactcagaaatcaagacaacaggaaatagaaccaagatattcactgtcacaaatttaccctgcaaaaagaggaactgatgttttgacgatctatataactcatcaattatctaccagattttcctgtggaaacattttcattgtctacagacaaaatggaagagagattttctctacttttttccttggtagctagcattcttaaagctaaggcttagaattctgtttgaaatcactcagccataaaaaacacatctgagaaaattcctgaactcactctgggaaagaaaaaggtaaatgagaattattaacaaatagaatgattagaaactaattttttaaaactcatctcttttatgtgctttgtaaatatttttttacctttcaagccctactaataaaatgcaaattacagttaaaacactgatgcagctgagtgcagtggctcatgtctgtaatcccagcacttcgggaggccaaagcaggtggatcgcttaagaacagaagtttgaagccagcctggtccatctctactaaaaacacaaaaactagccgggcgcagtggcgggcacctatagtcctagctattggggaggccgaggcatgagaatcacttgaacccaggagccaggggttgcagtgagctgagatcgagccactgcattccagcctgtgcaacagagactgtttcaaaacaaaacaaaaacaacaacagcacaaacacctgaggttaaaataagtgaacaaatcttttcaaggtacagatcctatcacccaccccatcctgttcaggtacatgctcaataactaccctcccaggagacaccgcgccatgccccagtgagtgccccacgtgcattttactttgttaagtttttacgccctctcactggggtcagttttttttgtcttttgaagtgttttttcactacttttctgctccccacccaagagaatccaggggtcagaaattatttgttttcccctcaataccagcatctgattgtctgaccagcaatgtgtctccaagaaatggaagctaggttgggtgaagaaaatcttcatgtctcaaggggttagcttttcaaaaaaaaaaaagaaaaaagtgcaccaggatctgcctttcaaccccaaggctgccacctgctcccttaagaggctacactccatacttcaggtagtcctatgggagaaaatgacccaagagctaacagtcactagacactctagcagacatagccatggtgggtatcttggtttatccccagaaagtactaaaacccaggaccagaaaaaaactgaaggttggctgaggacacatcaccctattaagtttccagagggtaatcttgacccaaaaacattcggtaagttctctggaaaaataaaagacaaagaggcacagatattttttacaatacagtgtcaggggattattctttgctttcttctcatgggaaatatttacaaacagaaaacaaatcttttcaatagtgttatgcaatactttttaaaaaatgactattggtcaggcgcagtggctcacgcctgtaatcccagcactttggaaggctgagacgggcggatcacgaggtcaagagatagagaccaccctggcaaacaaggtgaaaccctgtctctactaaaaatacaaaaattagctgggcgtggtggcacgcgcctgtactcccagctactcaggaggctgaggcaggagaatcgcttgaatccaagaggcggacgttgcagtgaggtgagatcgccccactgcactccagcatggcgacagagtgagactccatctcaaaaaaaaaaaaaagattgaggaacatggggtacacctgaggccctgcttgggacacatgtgaaaaacgccagggaaaatcagtcccctgtgggatgtgaaaataattaagtggcaggcaattagaatgaggaagctctagtccccagattcccacttctaaggaaaaaaaacaaaactcaagtgtattctttggtaaattactacattaggggaaacaaaattcaggcttaagcaactataaactgccaattaaactctgattacataaccaggaaatttccatctcgattgtacaaatttaaaaactacctaactaggctgggcgcggtggctcacgcctgtaatcccagcaatttgggaggctgaggcgggtggatcacaaggtcaggagatcgagaccatcctggctaacacggtgaaacccatctctactaaaaatacaaaaaattaggcgggcgtagtggcgggcgcctgtagtcccagctactggggaggctgaggcaggagaatggcgtgaacccaggaggcggagcttgcggtgagcggagatcgcgagactgcacgccaacctggcgacagagcgagactcaaataaataaataaataaataaaataaaataacaactacgtaactatacctaatcaattattgaatttggttttcttcatcatgcatttcataaatgtcttttcttcaagcccctcccatggactacaaacaacaaactgtagctgggtgctctacaattcttgaatcacactttcattaaattatttgatatttttgcggtgactcccccctccccgtttgtgtttttttaaggcagagtcttgctctgtcgcccaggctggagttcagtggcgcgatctcagctcacggcaacctccgcctactgggttcaacagattctcccacctctgcctccccagtagctgggactacagacatttgccatcacacacagctaacttttgtatttttagtagacatggggtttccccattttggccaggcttgtcttgaactcctgacctcaactgatcagcccgcctcgcctcccaacgtgctgggattacaggggtgacccaccacgcccggcccaataaatttttaataggagaaaagagaaactgtgaaccccacgaaccaaagctcttcccattcatgaacccgcaccccgagtcaggattctcccctgacgaccttcccgtggcccctgaacaatctgggaaagacctgtgggtgcagagctgcccggagagggttccacgccagggcacagtcactgcgcagggaaaagacaggacaccccggggacccgctgtcaacgcagccgccatgttatggctggggcggagctgggcaatgagaacttggagcgcagattgtggagctgactgccgggaggcctgagttctgccactgccacagccacagccacttcctccccagttccaaccagcccctctccctctctcgggatgtcgaactggcactctcaccatttctaggcttccagggggtcccggcgtcctagctgtgaccctcctaatacctgcaggtcacagggccacagaggctgggcctctaggagctgacggcacagagcagtgaagacgatagctggatctctggcgtcagcgagagacaatgggcccgccaaagccggaagccggaaaccgtcctgttcgctacagctgcgtggctgattggacggtttccagcccagcgtccctgattggataatgcttgaggccccgccccctcaggtcctgagttacagaagacgtgatccgatgctggactgagtgaagaaagagagacagtctaagctgcagccttttctttttttaaaaaaattttatttatttatttttttgagacggagtttcactcttgttgcccaggctggattgcaatggcgtcatcttgactcagtgcaacctctgcctcctgggttcgagcgattctcctgcctcagcctcccgggtatctgagattacaggcgcctgctaccatgcccggctaatttttttttgtagttttaatagagacggggtttcaccatattggccagcctggtctcaaactcctgtcctcaagttatccgcctgcctcggcctcccgaagtgctgggattacaagcttgagccaccaagcctggccagctgcagccttttcaaacaggacttcctccctgagctgagccaggcccaccccagagcatgggaaaattctctctctttttgactctctctctttttgaatatattcaaaaggtgaacggaagtattctgctgtcatattaataatacgtaaaatttttgttcaagagaaaatcaacttttactttggtaatagtgtattatcaattaaagctaattttaataaaaccttagaaataaatttgtcattttgaacactccagatttacatatatattttgtaatctcttgtaagttttttaactttttatattttatttttatccacattctttttatttttccatttgaaacaacctttaagtaatttcaaactgctatagggggtagaaagaaatcatttagggccaggcgcggtgggtcaagcctgtaatcccagcactttgggaggccaaggtgggcagatcacttgaggtcaggagttcaagactagcctggccaacatggtgaaaccccatctctactaaaaatacaaaaaattagcagggtgtgctggtgcacacatatagtccccgctactctggaggctgaggcaggagaatcacttgaacccaggaagtggaggttgtgtaacggcccaaggggttcaccttgccctttgcctagacagagccaattcatcaagacaggggaatttgtggaggaaaacttaaatattaaatttgaacttattgaacgtggacacaaacaatggtcaccaagtcttggaacaggttatgtgaaccccttgaggtgttcatcctgcgctgttttggagaaatctctatttcaatctattccaatacattggttattgaaaaacaatagacaatcacacacacacaaaaaaagttgacctttttgtgttctttgagcccaatcgcgaagggccctcatgactgggcctcatgccaaagaactcattacaaaaagagctagggtcccagatcacgcggaaccttcatgagacctctccttgtctgtgcagagatgggtggctgactctggagcccaggctgttgctttccagtctggtggtgaatcctcctagtctgatgagtgcggtatccgactctggagcccagcctgttgcttcctggtctggtggtgaatcctccatagtctggtgtggaggaaaagttaaatattaaatttgaactcaattgaacatggctacaaacaatggtcaccaagtcctggaacaagttgtgtgagctgcttgaggcattcatccagcgctgtattggagaaatctctatttcaatctattcctatacattagttgttgaaaaacaatagacaatcgcaaaagccagttgacttttgtgttccttgggtccagtcacgaatggccctcatgaatgggccttatgccaaataattcgttacaaaagagctagggtcccagaccgtgccaaagctccatgagagacctctcctcctctgtgcatgggcgagtgtccaactctggagcccaggctgttgcttcccactctggtggtaaatcctccatagtctggtgagtgtaaatatatatatgtctcttttctcctctccttttcctattgcaatttgcttattatatgaatcttcttcttatatcaatctgcttattgtatttatttgcttattatatcatttgcttattatatctgcattgccatttacgtgggataaagcttgtttacccttaaaggtattgtgtgtgtgtcttttcttctcaccttgagcctttccctcacagaacatttttggcattacaaacaggatttgaaaccaaaagtgtgcctctttttggccacaaggacagggctggaggctcggggacttcccataccctgggatgggaactcccccagttctcccccttggtgattgaatggtccaggggaactggactttgtgagaattgagaatctaaattagtgcaatttaaacctttgtgcatgaagtgctgcaggagattccagtcagcaaaaaagatgctgagggatctcccagagtggatggtgtttccttactgcttataagtttatgtgtcaagatacgggctggttgcaagaagagaaatgtaagttggaaaacgaatatgctaatctgacttccagactggccctggcccaatgccaggcctatgtcttgattgatcaggctcaaagctatcagcctattgctgaaaaaagcagctgtccaagtggcccggtcagggtgaaactgaagaactagtcagttggggcttggaacaggtaaaaacccagctcctatctcagaaatgggaaattaacctagtaaaattcaaggacccgcacaaactgtaaaattccatggcgttctatggaatgcagagatgtagtccatcttaccaaagactaaggctaaaatactagaatttacaacccctaccactaaaaaggaggcccagaaatttattggctttgtttggattctggagacatcatattccccacttgggtaacattttacaacctctgcatgcagactttcactggggagagacagagagcatggcttcttaacaagctaaacaagcagtgcaactggccctggatctatggcccatacgggatgggccagcagaactccaagtgactgtcctagatcaacatgctaattgaagcggtaggcagaaacaagatgggaagagggtacctttcaggttttggacccagaaactgccagaggccagaaaagcttatacccctttcaagaagcaattgttagcttgctattgggctttgctggaaacggaacacctctgtttcaaccatgaggtctttatgaggcctgaaatttctattatgacttgggtcatgagttccctcaaagctcaccagatagagcactctcaagaaagtagcatcataaaatggaaatagtacatacaagtccatttaagccaaaaccaaacggggtatcacttttacatgaggacgtacaaaacttcccagctcaggaaatcaccaagcaagccttgctgttagggaaggaaacctcccctgcccaatggggcaaatcctttaaagaactaagcccagaggatcagaaatatgcttggtttactgatggatccaccaaatacattggtgggacccgatgcttgaaggccgtggcttataatcctgttaaaaacataagtatttatgatgaaggaaggggtgggagcagccagttagctgaactagtagccatcctctgagctattcaagaggaggccagagggatttgtcacttgtataccaactcttggtctgtagcaaatgatcttactacctggataccccaatggtaacaaaacaaatggttaattgggaataaagaggtttggggaaaacaatactggggagatatctgaatcctttcgcacactaccattatcaccgttttccacgttgatgcccgtgcatctctgctttctcttgacagactatttaatcagcaagttatcaataacgccaaaatttccaccataactgcaaacttgaatggattacgtgtccaagcctttcaatgacaggcattgtaatgtatggtggtataattgatagtgattattggcctaaatgctactaatttagtggcctaaatgctccacttaaaagacacaaaatggcagaatggataagagtttaccaggctgggtgcagtggctcctgcctgtaatcccagcagtttgggaggctgaggtgggtgaatcacctgaggtcgggagtttgagaccagcctgaccaacatggagaaaccctgtctctactaaaaatacaaaatttagccagacgtggtcgtgcatgcctgtaatcccagctactcaggaggctgaggtagcagaatagcttgaacccaggaggcagaggttgcggtgagccgagatcatgccattgaactccagcctggacaatgagaattaaactccaactcaaaaaagaaaaaaaaaaaagattttacaggccaaatatctgctatcttcaagagactcacccaacacataaggactcacttaaacttaagggaaagggttggaaaaagatattccatgcaaatgtaccccaaaagctagcagtagtagccattcttacatcagacaaaacagatattaaagcaaaaacagttaaaaaaaaaaaagaaaagacaaagagggacattatataatgataaaaggactagtccaacaggaaaacatcacacctctaaatatatatgcaccttacactggagctcccaaatttataaaacaattactactagacctaagaaatgaaatagatgacaacacaataataatgagggacttcaatactctactgacagcagtagacaagtcatcaagacggaaagtcaacaacaacaacaaacaatggacttaaactatatcctagaacaaatggacttaaaatatatttacaaacattctatccaagaactgcagaatatacattttattcatcagcacttgaaacattttccaagatagacatatgataggccacaagtctcaataaatttaagacaatcaaaattatatcaactactctctcagactgcagtggaataaaagtgaaaatcaactccaaatgaaccatcaaaaccatgcaaatacacggaaattaaatttaaaaattaaagatcaacctgtttctgaatgagtgttggatgaaatcaagatggaaatttaaaaattctttgaactgaatgcactcgccatgtccatggagagaggctgaggcggccgagctccggctggaggtaccggagcgccaggacagcaaagatgtcggctgccttagtccgggcaaatgtctgggctgtgagcaagaggaaacttcagcccacctgggccgccctcaccctgacaccttcagcagtaaacaagataaaacaacttcttaaagataagcctgagcatgtaggtgtaaaagttggtgtgcgagccaggaggctgtaatggcctttcttatattctagaatatacaaagacaaaaggagattctggtgaagttattcaagatggagtcagagtattcattgaaaagaaagcaaagctaacacttttaggaacagagatggactatgttgaagaaaaattatccagtgagtttgtgttcaataacccaaacatcaaaggaacttgtggctgtggagaaagctttaatatttgaaatctcaggactcttctggccgtaggttccaggaaagctggtggaagccttggggctcactgcagaaatcatgtgactgtcacgtgtttaatatgctgctgccttgtaaggaaaataaagtgatgcattttgaaaatgaagccagtgtgttagattccagaagaaatgatatttgtattccctgtaggggacagaaaatgagaagccatcactctctttggatcatttaggtctcttacatcctttgttttagaaacagtttcattaaagttgccttcctgggcacctgtttatccatttcctggaccgtgtgcactccttagctctctactgaatggcttgaacatgcatccccctcagcatttctcccaaccagatcggcaactcctaaaatctgagataggacgtcctgactgctggtagtaacatggtggtgcattgttttttccaaccaaacttaacatagccttttagtacatttgtatgaaaatttttattttcagatgcctcattgcgtaccctttaatagtaccgggcaaagattttcttcaactatagtacagattagttctgagtgatggtatcaaaaggtgagaaagatgtcatccacctgttttttaatccatttcttttgccaccctatatgtctgctcagagatgggatctcaaggtgactttgattcttttagttgtggggtctcttaaagccatctagcccacctccctcaattccctatgtgaggaagcaaatccccagggaagccaaagtgctcctgtccacccccactccacaggccaagggagaatggggactctacccccatctccccttccttgtaggtgacacatgctctgccctctgaggcaatcagtgaaggcaaatggtctgatttctttatttggttgacattttgatagaatttctttataatttgatggagatcatagtattttattttgagtgggaagaattttaaaaccattttatgtgaattaccatcttgtttctttcacctttgaaacaatggtttgtagcagagaagacattgtagcaacccagaattatgcttttggaatgtggtcctcattgtgcaggagaacatggggatcttttcttaaaattctgtgtgcatacactttctgattcctcggtccagttgctaaagtttttaatattttagcctaatatttttatcatcaacctttctttaaaagtgttccttttgtcacgtagttactgattttcccgggtttgacatgttaagtattctatgaaatgacatatatgctttttttgaaagctgattctcatgaattcaagtagctgaggtcctttatgtttctttcattccctaaagtagctggcacaaaacacaccaaaacctagagcagtagttttatgtaaatgctcatgagtttgtatcaataatataattgttgatccacttataattcattcaatactgtatgtatctagagattgagttgtcaattaaaaaaaaaatgaggcctcaggctgggtgtggtggctcatgcctgtaattccagcacttagggaggccgaggtgggtggatcacctgaggtcagaagttcgagaccagcctggccaacatggtgaaaccctgtctactaaaaataaaaaaaaattagctgggcatgatagcaggtacctgtaatcccagctacttgggaggctgaggtaggagaattgcttgaacctgggaggtggaggttgcagtgagccgagatcttgccattgcactccagcctgggaaacaatgtgagactctatcaaaagaaaaaaaatgtggcctctttgtgatcataaaaaaaaaattatttgaaccgaacaataataatgacacaagctatcaaaatatctggtatatggcaaaagcggtgctaaaaggaatgttcatagcattaaatgcctacatcaaaaagtctgaaagagcttaagtagacaatgtaagataacacctcaaggaactagagaaacaagaacaagccaaacccaaacccagtagaagaaaagaaataacaaagatgagagcagaactaaatgaaactgaaacaacaacaacaataaaacagaagataaatgaaatgaaaagctggctcttagaaaagataaacaaaattgatagaccattaacagcattaaccaagaagagagaagatccaaacaagctcagttagacctgaaatggaagatattgcaactgatgccacagaaatacaaaagatcattgagggctactgtgaacacctttacatgcacaaattagaaaacctacagaagatgactaaattcctggaaatgtacaaccctcctagattaaaaaacaaaaacaactctgaacagactaataacaagcagtgagattgaaataataattaaaaaaaattgccaaccaaaaaagaagttcagaaccaggtggattcacagctgaattctatcagacattcagagaaaaactgatggggatggggccaagatggctgactagaagcagcatcccttagaaaagaatcataatagcatgtgaaacctgcaccgtcacctgaggtatccaggttctgtcatcagaactgactaggtggctggcatgaaccatggagaagaaggaagagcagtgtggggcaacagcccacctgacacccacatgggcctggggagcccccaccccccagccaagggaggcagtgagtgagcatcctacccagcctgggaaactgtgctttttccatggaacagtgcaacccatggatcagaagattccactcgtgaacccacgccaccggagcctaaggtaccaactgttggaaacaagagctcagagtcacaaagaaaacaagcactcaaacaaggaatttctcagcaaggcaaatttacttctacagaagggtgctgctcacatctctggttgttgtgagagcacactgtactagagagggaaggggttattattgctaacatagtccctacttctgtgtcctgtccccattggctggagtcagaccacataatataagctaactcgattggttattttaaatcgagactggcaggaaggttgtttacagagcaggtaactaggagtgaggaggacttcttccaaataaagaagagatgtgggttacagattgggactggtgggaagggttgtttacagagcaggtagcttggagcaggaacatacaaggaagttgatttggagaacaaagaacaaggaagttatcctttgaagagaaacttattatgcctgacacaaccctggagctaagcagatcctcaacagcctctcagctagaatctgcgtaagcctgccaagttcccaggggaggggcgaccagtaccacagctgtgtctggctgctgtctaagccctttgagctccttgggggagggacagcagccagcaatgggactcacaactgcctgacaggctaagctccctgggctcaggaagggcagcagccatctctatagctcctggccacacttttcccctgctagagccagggaggctggacagcttggtctcaagagatgtcccctacaacccaacactctggctgttgcagactgcagccagagtgtctcttcaggcctgaccctgaccatccctcctcactgggcagggcctcccagcaggaactccaacagctccagccaggggctcagaggcagaactctgatctccctgggcctgagcccctagggggaggggtgactgcagtctctgtggaccagcagacttagcctttcctcctgctagttctgaggaattcaggcagcccagatgagtgggcttcccctcaggaatcaccccacccctccaccgaaggatagtcaaagtgcttcattaaatgggttaggctccctgtgccacccaaatgggtgagacccttcaacaggggttgtcagacaccctatacaggagcgatcctatgggcatcaggttggtgcctcttgaggtcaaagattccagaggaaagagtaggcacctgtctttgctgttctccaacctccttgagtgacatctccaggcacgggagtaaaccagatgaatagggccggaagtgatcccccagcaaactgcagcagccctacagaagagggacctgaccattgaaagaaaaacaagcaaacggaaagcaacaacaacagcatcaacaacaaaaaagtacccacaaaaaccgtatccgaggccgggcatggtggctttcacctgtgaccccaagactttgggaggctgaggtgggcagatcgcttgaggccagagttcaagactagcctggccaacatggcgaaaccctgtctctactaaaaaatgcaaaaattagccaggcgtggtggtgcatgactgtagtgccagctacttgggagtctgagacatgagaatcacctgaacctgggaggtggaggttgcagtgagccgagatcatgccactgcactccagcctgggtaatagagcaagactctgtctaaaaaataaaaataaaaataaaataaaaataaaaataaaaaaccatccaaggatcagcagcctcaaagatcaaaactagacaaactcatgaagatgagaaagaatcaacaaaaaaatgctgaaaggccagagtgccttttctcctccaaatgatcaaaatgtctcttcagcaacgtgcagaactggacagaggatgagatggatgaattaacagaagtaggcagataataacaaagtctgctgagctaaaagaacatgttctaacccaattcaaagaagctaagaaccttgataaaaggttagaggaaatgctaactagaataaccagtttggagaagaacataaatgacctgatggagctgaaaaacacagcatgagaacttcatgaagcatacaaaagtatcaatagccgaatagaccaagcagaagaaaggatatcagagtttgaagaccaccttgccgaaataaggcttgcagagaagattaaagaaaaaagaataaaaaggaacaaacaaagcctctgagaaatatggtgttctgtgtggaaaatgcacagggggagaagaaaagacacacacacagtacctttaagggtaaacaagctttatcccatgtaaatggcaatgcagatacaataagcgaattgatatcataagcaaattgcagtgggaaggggagaagggaaaagagatgtgtatatatatatatatttacactcacgagactatggaggattcatcaccagatcaggaagcaacagcctgggctccagggtcagacaccagactcaccagactatggaggattcaccaacacactgggaagcaacagcctgggctctagagttggccacccattcatgcacagacaagcagaggtctcttgaagctttggtgcagtctgggaccctagctctttttgtaacaagttgtttggcatgaggcccagtcacgagggcccttcgtgactgggctcaaggaacacaaaaaggtcaacttgtttttgcgattgtctattatttttcaataactaacatatagaatagatggcaatagagatttttctgaaacagtgctggatgaacgcctcgaggggctcacacaacctgttctgggacttgatgaccattgtttgtgtccacgttcaacggagttcaaatttaatatttaactattccaccgcattcacaactccttctgtatattgtaaatatagcactcaaaaatgtgcatgttcgtattcatgactttaaatttctactttattatctagaaaaatatcataaataaactgatgtagtggatctcatgctgctctttcttctcggagttagagaatacattagagaatatttctatgttgaaaattattttattggataattttagtcagtcctataagccagaaccaattgtctttactctctaatttcaccttaagtcaaattaaaagtctcgcccatggccacttggtaaaaacgtgtgtgtgtgtgtgttttccagggaccattgcaatttagagacgtggccatagaattctctctggaggagtggcattgcctggacactgcacagtggaatttatatagggatgtgatgttagagaactacagacacctggtcttccttggtgaggataacttgaatgtataattcataatgtaccctaaaggttttatttctcctttttgtgaaatgttttttagtaatttattttttgcgtaaaagagtttcagatgccctttttccagaaaatttttagaatttgttcatttagaaaagaatttcaagatgtttaatcttttttttttttgagacagagtctcgctttgtcacccaggctggagtgtagtggcacgatctcagctcactgcaacctccgcctcccgggttcacgctattctcctgcctcagcctcccgagtagctgggactgttggcgtacgccgccacgcctggctaatttttttttttttttgtatttttagtagagatgaggtttcaccgtgttgtccaggatggtctcgatctcctgacctcgtgatctgcccgcctcagcctctcaaagtgctgggattacatgcgtgagccactgcgctcagccaagatgtttaatcttaatccaaaatctccacatgcctgagttgagctgtgttcttcactctaaattagcggtaagcccagaaatttagtggcataaaatattgttgtccgcacctgaaaatctaattgccaccatcaatttttgattcagtcacaccaggtagtaaaatttaaaaatctacaagcaaaaccgggtgcggtggctcaagcctgtaatcccagcactttgggaggccgaggcggacggatcacctgaggtcgggagtttgagacctgcctgaccaacatggagaaaccacatctctactaaaaatacaaaattagcagggcatggtggcgcacacctgtaatcccagctactccagaggctgagagaggagaatcctttgaacccaggaggcagagcttgcagtgagccaagatcgcaccactgcactccagcctgggcaacagagcaagactccatctcaaaaaataaataaataaataaaagcacaatattatactggacagcaggaagagctgtgttgggtataacagagctttctttttcttctatgtggctatttcattctgctcacgtggggaacttcacacatttaactcatttatacatttttttacacatgtattttggtcagtacgtttttgttacatttatgtgtccaggaagaaattagagctggtggtattttgctatgtcatcttgcttatgtagtttgtataattttataggttagatttgtaaagtatatttatttatctgagtctagcaattgaagtaatgtgattttactgtttctttctgttatgtgttctcattttgcccaagacctttggccagagcagagcataaaagattctttccaaaaagtgatacttagaagatatgaaaaatgtggatatgacaatttacagttaaaaaaaggctgtgaaagtgtggatgagcatgagctgctcaaaagaggtaataatggtcttcaccacagtctgacaactacccagagaaaaatatttcaatgtgataaatatgggacagtctttcagaaattttcaaattgaaacagacctaagatacgacatactggaaaaaaatctttcaaatgtatagtatgcggcaaagcttttaactcgtcctcaaaccttactacacataagaaaattcatactggagagaaaccctacagatgtgaagaatgtggcaaagccttcaaaaggtcctcacaccttactgtacataagatagttcatactggagagaaatcctacaaatgtgaagaatgcgggaaagcctttaagcacccctcacatgttactgcacataagaaaattcatactggagggaaaccctacaaatgtgaagaatgtggcaaagactttaagtacacttctacccttattgcacataagagaattcatactggagagaagccctacaaatgtgaagaatgtggcaaagacttttaagtgcacttctaaccttactacacataagagaattcatactggagagaagccctacaaatgtaaagaatgtggcaaagcttttcacctatcctcacaccttactacacataagatacttcatactggagagaagccctacaggtgtaaagaatgtggcaaagcttttaaccattccacaatccttttttcacacaaaaaaattcatactggagagaaattctacaaatgtgatgaatgtggcaaaacctttacctggccctcactactctctaaacacaggagaactcatactggagagaaaccctacaaatgtgaagtgtgtggcaaagcctttactgcatccttaactctaactgaacatcagagaattcatactggagagaaaccttacaaatgtgaagaatgtggcaaagcttttaactggtcctcataccttcataaacataagagaattcatattgcacagaaaccctacatagtgaagaatgtggcaaacattttaaatattcctccacttttaataagcataagataattcatactggagagaaactggatgaatgtgggaaagcctttaaccagccctcgactcttactaactatgagaatttatatggaacataaactcatacaaatataacaaatataaaaaatgtgacaaagctttttttaaaatttttttatttatttttttattatactttaagttttagggtacatgtgcacattgtgcaggttagttacatatgtatacatgtgccatgctggtgcgctgcacccactaactcgtcatctagcattaggtatatctcccaatgctatccctcccccctccccccaccccaccacagtccccagagtgtgatattccccttcctgtgtccatgtgatctcattgttcaattcccacctatgagaatatgcggtgtttggttttttgttcttgcgatagtttactgagaatgatgatttccagtttcatccatgtccctacaaaggacatgaactcatcattttttatggctgcatagtattccatggtgtatatgtgccacattttcttaatccagtctatcattgttggacatttgggtgacaaagcttttaaaggaagttctcaacctttattacacgtaattcatactggacagaaaccctacaagtgtgaagaatgtggcatggcctataagaagttctcaattccatttttttttttttttttgagatgaaatttcagtcttgtcacccaggctggagtacaatggcatgatcttggctcactgcaacctctacctcctgggttcaagccattctcctgtcttagcctcccaagtagctgggattacagttgcccaccaccacgtctggctaattttttgtatttctagtagagacggggtttcacaatgttggccagtctggtctcgaactcttgacctcaggtgatccacccaccttggcctcccaaagtcctagggttacaggcatgagccaccatgcctggctacaggttttcaattcttaagagacatggtgataattcatgctggagaggaaatctacaaacctgaaagatgtgacagtgctttttaccaacacctccaaatttcctatacataaaaataaattacactaatgtgaaaccctagaaatgtataaaatgtgacaaagcctttatatggttgtgacactgattgtaggtaagataattcatactggcaaaactcctacaagtgtgaagaatgtggtaaaacttttaatcagtgcttacaccgtatttcacaggaaagctattatccttgagaaaaattgtacaaatataaagaatatggaaaagccattaatgcccatcacatcttactcaacagaagaaagctcgtagttaataaaagcatgaaaagggcaattactgtcaaaaaatctttcagaaaatataagcctttagagtgaagaatatttattttgaagacagccattacaaatataaagtgggttgtagtgcctttacttgtgtcacagatcttattgaacacatttgtactagaagaaaaccctgaagcagttgctcaagctttgctcaacattggaatttatattggagaagagtcctgctaatgaatttggaaagccctttttttttttttcaaaaactgcagcttagaaaacaccagagagcttatactaaaatatatttttgcagatgcagtaaatataaaaaaatttaattcaaaattgattctatgtaaatatcagataatttacagcaaaataactaaggcactgacacttcagacattacactaaatcagagtgttgagtataaaaactaatccacagctacagctgttaaattatttgtatataactttaaaagtagtagatttttttttttttttttgagacggagtctcgctctgtcgcccaggctggagtgcagtggcgggatctcggctcactgcaagctccgcctcccgggttcacgccattctcctgcctcagcctcccaagtagctgggactacaggcgcccgccactacgcccggctaatttttcgtatttttagtagagacggggtttcaccgttttagccgggatggtctcgatctcctgacctcgtgatccgcccgcctcggcctcccaaagtgctgggattacaggcgtgagccgccgcgcccggcctaaaagtagtagatttttttgaagcattgtagttacattgaaagtatagttgtttccttgaaaaaacaattttgaaaagtgaataaatatgtaatatggttttcatattactttatgctgttatttctattgtgctcacatgtgaaagcatgtgatcaattgttgctgcatcagatatattagagattgtttactaattgggcattacttagaaccttttctataaaagagtaagaacatcaaaatctatgatggatgatgaaaatgtaagtggagcgcctttttgtagttaacttatactaagtaatgtataaggtgggggttcatgttctcatttgtattatcgtaccctataacttaatgttgacactttgctttgtcttttggatggcctaacctacattaacatgtatgcagaacatcttaaaacttttttttcaaaagttataatgaattactttattagtaacaaagattaaaaaaggtgggggttcagagtaatatttttctacattatagtgagataaaaattattatagttaaaagtattaaattagtatattattttactagttgtacttttatgtaataaaatgcagtacacttcaaaattgttagattttgaacttaattttatttttttaccatgttaagactattgtgcatttaatgaagcattattatgccacttaactttaacctatttaaccttactcaacagtgtaggtaaaagatggtagcaatatactatttggttcatagtggaataacatctctagtaatccctttgccagtggctttaaactgtaaatcagctgaagaatattttcccactggttaaatttttattcttttttcttattgaaattaattattagtattttggggtatatagtatgtgtatatatttattccttatatggcatattttgattcaggcatacaatatgtagtaattacattagggtaaataaggtatccatcacctctagcatttatcttttctgttacaaagagtgtaattaacacttttagtgtataatttagtgaggcaggtggattgcctgaggtcaggagttcaagagcagcctggccaacatgctgaaagcccgtgtctattaaaaattcagaaattaaccaggcatggtagtgcaagcctggaggctgaggcaggagagtcgcttgaatcccttaggtggaggttgcagtgagctgagatcatgccactgcactccggactggggaatagagcgagactccctctcaaaaaaaagtgaaagaaatataaataaaattcttacattcttagtcctgaaaaattattaataaacaattgttatttaattgtttttgaacatgtggtctctctgcctgcaaacatatacacttttagttttaatttacatatagttaaatatacacatattactctgaagataactttaggtgtaagaaaattattcagtgagtaagtgtgtttgtgtgagtatgagtttgtacatattttcagaagaaaagagcaattattggaacaaaatgaattattttaatagggtaactaataaaaaactaaacaccttgaaaatgctgaaagcaaatccacactttctgctttgtcttgaatttattaatgtaaaattttatggcttatgtctcagattctccccagaatctgcctattaaagcacaggcaattttgtctccagaaataacactcttgactacaacaataaaagccctcttcaaacaaaaaatcatttttaacacttattttaatgaaaatttaaccacaattgaataattggtatatttttattgttctgtgtgtgaatgtataaaacagtacataaagaagccagaaaaaaagatgttaatatttgtaatgaattaaactggaaagttattaattattatttgcaggtgatatctttgattatgtagataagaaaagcagcagaaagacttttaaaagtttattcaggtgggtaagcaatattctaagataataccctggattcccagtctgttgcacacctgcggtggaatactctcgagtgtaaaaatgtgactgtggtgggacatcactcatgaaattaggttacccatgtgttgactttgtgtttatcaaaatggagattatcctgactgtgctaaacttaatcagaggtgtttttaagagaaaaagacacattataggaaaacacccctgctggcctgaaagtgacttctataggtggaacatgttgtaagctgcttatggtggccacatggcaggaaacatgcttgtatattgtcatcatttctgcctcttgcatgttgttcccagtagggagaataagaggttcctatggcagatggaaaaaaggggaatctcattcatgcaagaaataatcacctctcatctgggatagcttaagagaaacaggagaccacaaaaagactacattaatgggaggaaaagggtaacctggctaaaagtgctcactggcattaaggaacaacatttagtaagctgtagtgaacgatcagcctctgggatactgatagtctaccaataaggttgaacttattctaattcagtcaacatctctgcaccattctggtgacccaggtttacactattcattacagaaatgccatgaaaaccagtgggtaatgtcctagaattgaacttacttcaaaaggcatacctttttgttttcacatttgaaaaacctcaaaaacagtgaatttataattaacttctaattatagaggattctactatactgtaatagattaaactgtaaagaacttaatatgaatatttcttgaatacataattagttgtgtagatagtttcttttagattaacatgaaaaaactattagagaaaacatttgaaatgagataaaattaatcaagaccacaacttttcagtgggttggcctaattgccatgcttttggagatggccagacgactaacaagaaacagacaagatttggctttgctcaatgattgttttgcaccttttgaaatctaacatcctggctaaagtattcaaagggaatattttatagatggcttctcagggtttccaaggcaatgaaagaaaaattttgataggcaggaaaatgcacactgtctacacacattgctcttctctgatttgctttaatactgaaaaattgaagattgtaaatgtcatctcaatttagagtaaattaacaaaagatttgtttttgaaaaaagcaaatgtataaaattaatgggtaacggatgccattagcttctaaaaactagtatgactaaattcagtaagtatctagccatgcaaatatcagcccaattaaatgaagaccctcataggtgcatgtggaaagcattgctgtgcagtgtggtgcctccactcagcattttcttctgcctcttcatagagaaaccagtttcccctgagtgactcacggtgcatactggggactgagaatgctgtgttcagagtgattactgaaaacgtggttaatacacttcttctatacgataataaaatgttataaatcttactctgcctcagaaaagcttttagtaaaagtttatagtactcaatttgggttaatggaaaatttcagtattccagataattcagacacttaaatgtcagtgaaatcccataaaacatatttgaataagataaagtcttctttgctgagaattttatattactggtaaatttagaaaaccagtactttaagccaattagcagtgtttgacatgtgagtcgcacccagacaagtgctcttcatgatcattgttaaagcagcaatagcaccacgtgctttcctgggacctgctgtcctgttttccacgatataaagtggagaaggcattgaaatggcaaaggagtgtgatataaattgaatacttatatgaaacaaaattttaaataaaaaatagcacttgaagttgtacaactataggtgagactattagtgtgaggtcatatttttacttatactgacaaaataaccacaatattcttatttagaataatattccttttctgctatatatttgctagtttttgataaaatactatgggagctcaatagaaatcaacaaaatgaatcttaattttaccagaagcattattgatgcatatgcttgttttttcttaagatccattagctttctatgaaagatttatacttttttttcagtgtcttatttattgcttagaagtggctctcctgccagaaaactgttattctcagctgtacccatgttgactagtagtgagtagaagcgaagtggataaaaagtaaatgtatcttctctgtatcttttttcatccattggctgaagaacagaaggatgaagaagatgaaagcaaatataatctctgaaagatcatgaagctctgttaaccagacaaaaatccccatagtggatgtgtgttaattttatttatttatttttattgtactgcctacttctatgagttgaatttttttttttttttgagatggagtcttgctctgttgcccaggctggaggggaggaatggcacgatcttggctcactgcaacctccaaatcccaggttcaagcggatctcctgcctcagtctgttgagtagctgggattacaggcacgcaccaccacccccagctaatttctgtatttttagagtagacacagggtttcaccaggttggtcaggccggtcttgaacttctcatttagtgatttgcctgcctcggcctcccaaagttctgggattataggtgtgagccactgcgctgggcaagtttaaattttttttttttacactttatatggaaataggattatgtgggctgggcccggtggctcatgcctgtaatcccaccaatttgggaggccgagatgggtggatcacttgaggtcaggagttcaagatcagcctggccaacatggtgaaaccccatctctactaaaaatatgaaaattagttggacgtggtggtaggagcctgtaatttcaggtactgaggcggctgaggcagaagaatcacatgaacccaggaggcggaggtttaagtgagctgagatggtgttactgcaccatcgcctgggcaatgagctaaactccgtctccaaaaaaataaataggatttttgtgtgtgtgtttttctgtgctggcttattttacttagcataatattttttaggttcatgaatgttgtagcaaataacaagactttcttatttctaagggctgaatagcatttaattgtgtacatataccacattttctttctccacctattgatggacacttaggttggttccataccttagctattgtgagtaatccacttccttccttctcttttgttttgtttttgatttgttttgagacgagtctcatctgtggcccaagctggagttcagtgtcgcgatcttggctcactgcaacctctgcctcgcaggttcaagccattttagtgcctcagcctttgcgcctggccaaaaatatattttaaataaggtacttatgaccgagcgtggtggctcacacctgtaatcccagcactttgggaggccaaggtgggcagatcatctgaggtcacgagttcgagaccagcctggccaatgtggtgaaaccccgtctctactaaaaaatacaaaaaaaattagctgggtatggtggcaggtgccttaatcctaagtacttgggaggcagaggcaggagaatcgtttgaaccccggaggcagaggttgcagtgagctgagataaagccattgcactcaaacctgggggacaagagtgagacttctttcaataaataaatacttagatataaactaacaaatcttgtagaaaaaaacgagaaaaagacatggcattggtcttggcaccatttccctagataccacattaaatgcatgaacaacaaataaaagtttaactacactagactttaaaatttctgcacatccaaacaaaattgaagagtgacaacgtcacttagaaaatgggtgaaaacattggcaaattacatgtgaaaaaagtgaatattcaaaatatataaacaactcttaaaactaaacaataaagttaaataacttgatttaaaaatggaggaacaaaattttcatcaaaaagatacccaaaaggacacacaaattgggcacatgggctcacgcctgtaatctcagcactctgggaggccgaggcgggtggatcacctgaggtcgggtgttctagaccagcccgaccaacatggagaaatgccgactatactaaacacaaaattagccgggcgtggtggcacatgcctgtaatctcagctattcaggaggctgaggcacgagaatcacttgaacccgggaggtgcaggttgcagtgagccaagatcgcaccactgcacttccagcctgggtgacagagtgtgaattcatctcaaaaaaaaaaaaaatttgttagataattgcaatatttaactgttactgtatactcatcaaatgcagatattttgaatcattgccatgaactgtgtggcagtaagatttcagagaatatgcagtataattataaataatattctaatgagaaacttttaataaataagcatttaaaagaaactagagttactttttatgttttaaatatatgctattcttacacaaaatggaactgctgtaatccaacttaagaagcaaagaacagccttacattgttaaatacagaaaatacatacatatatatatttggcagaatagggttagaccctctgatatgcaaaacaaatattaggaaataaactatggtattatttagatacaggctgaagaaagtagaagaaaatcctataattcctttttgcttgcagcaaacttaaatatataagtaactattttggtaagtgtggagtgcctcctaattatgtaatttactgtaggcatatcatacaaattctaggatattgtcctaaatatctgaatctaaaattacaaatttgaaatagaaaatagaaagtaaaaatatatagggagaaggacatcagtaagatgaaaagattaaaagtgccctgttttcatatcccattacagcaaaaaaaagtcagctatttctgacaaaaatgcctatattggccagccggggtggctgatgcctttaatcccagaaatttggagggtcgaggctggaagatcacgaggtcaggagtttgagaccagcccagccaacatggtgaagacccatttctaataaaatacaaaaaaattagccggttatggtgatgcacgcctgtaatcctagctatgcagaaggctgaggcaggagaattgcttgaacccagaaggtggaggttgcagtgagctgagatggccccactgcactccagcctgggtggcagagtgagactccatctcagagagagaaaaaaaaaagcctttattcgagaaccaggcattatggctcacacctgtaatgacagctacatggtacattaaggttggagaactgcttcaggccaggatttcgagaccagcctgggttatgtagcaacatgacatctccaaaataagtgtctgtaagagagatttgagatccagggagggagttctgaaacactgttaaagcttaagattgagaagagttctattcagaaggcaggccctcattcaagtgggaaactacaggtcctgcagatcttggcctttactggggtccccaaagcagttcaatgactcagcttcagttacctgagccacagtttatggccagttctgcctacatagaaatccacacagttacctgaggaaatggtctctggtactcagtgaaagccatacttacccacatcctgatacaaggcccaccgtatgcagacccgactgcaaaaacctgccctagggtctgccctactgagcaaagtcctgaaggatatgcagtctgtccaaaaataaaacgggaattacaacaacccaagtccctgtaacaagccgactaaaggtggaccctagtgcaggcccagcagccttgtcaccaagttacaccccctctccactaccaattcagagggcatctcctcaccctaagggcccaacaaaagaacaactttaccttctgaaatcaatttatgaaaacttgaaggggtgtttactccatcaaattcagacaccaagacaaaactagattttgcccattgtcaatggctctattttaatgtagcactggaagtatgtggcagaagaattagtcagagaaatttaaaaatgcatttaaattcaagaaaaataagtaaaagttgctgtttgtagatcatacaactatatatatatatatatatatatatatattttttttttttttttttttttttttttgagatggagttttgctcttgtagctcaggctggagtgaaatggcacgatgtcaactcaccacaacctctgcctaccgggattaagtgactgtctggcctcagcctctcgagtagctgggattacaggcatgtgccaccatacccagctaatttttgtatttttagtagagatgggggttttctccatgttggtcaggctggccttgaactcccgacctcaggtgattcacccacctcggcctcccaaagtgctgggattacaggtgtgagccactgcacccggcccatacaactttatatttgaaaaagcataaacagtatattaaaacctgtctaaactaataaatatactcagtaaattagccaaatataaaattaacataaaagtatatgtatggtttcatacacttaaactatctggtaaaatagaagaagaggctgggcagggtgactcatgcctgcaattccagcactttgggaggccgaggcgggtggatcatgtgaggtcaggagtttgagaccagcctggccaacatgctgaaaccttgtctctactaaaaattagctgggtgtggtggcaggcacctgcaatctcagctagtcaggaggctgaggcaagagaattgcttgaacccaggaggtggaggttgaagtgagcaacagtgcaagacatcatctcaaaagaaaaaaaaaaagaaaaaatagaggaaaaaaaatcttatttactatggcattaaataataaatttgtgagaaaaaattaaggaggtaaaaaaatccatacaataaaaaaagaaaaaaattagagaagatcacaataaattttaaattattttatgtgtattaattgaaagaataagtattgttaaagtgctatgttatccaaagtgatttatagattcattaaacttcctataaaaattgcagtggtatttttttcacaataatggaaaatacgattctaaaatttacatgaaactaaaataaactttgaatagccaaagcaaacttgaggtaaaagaacaaagcaggatatcatatttacaatttcaaactatatttcaagactatatagtaataaaaacagaatggactgtgcagaaaaatgtacaaaaaaaatgcaacgggatctactactctcacacatttcagtcccgatgcaaaaagagaacttaaaaaatagttttaatttctcgaaatcatgcagatatttgtgtgtcccaaaaacaatgaataataagccagtgcagtcttttacatgccattaagaggactttggctttcagtgtaaattgaaggaagctcacgtaaagaaaagtagaatccttaagagaatttaaaagtataagacagggctgggcgcagtggcgcatgcctgtaattccagcactttgggaggccaaggcgggccgattgcctgaggtcaggagtccgaggccagcctgagcaacatggagaaaccccttctgtaataaaaatacaaaattagccgggcgtgggggcgcaggcctgtaatcccagctactcggaaggctgaggcaggagaatcacttgaacccaggaaagggaggttgcggtgatctgagatcgtaccattgcactcctgcctgggcaacaagagtgaaactctgccttaaaaaagaaaaagcatagtcgggcgcggtggctcacgcctgtagtcccagaactttgggaggcggaggtgggcggatcacaccgtctggagttggagaccagcctggacaatatggtgaaaccccatctctactaaaactacaaaaattagcggggcatggggcggtctcctgtactcccagctactcgggaggctgaggcaggtaaattgcttgaacccgggaggtggaggttgcagtgagcagagattcagagattgcgccactgcactccagcctgggcgacagagcgagactcggtctcaaaaaaaaaaaaaaaaaaaaaaaaggcataagacagaagatgccctgtgtgagagcaaaatttaagaaaagaaaaaagaaaaactgcccagaaactatttcctttggagcacagcttcccaaatcacattttaaggactggctttctctttgaccttggcacctcttatctgtgttgtctgttgtattcattttcactcgcacctacctgggggtttggcaatcatctcatgtctcttcacagtgaaaggtttttttccctgctccagacaggtgatcaggtctggcttagagacaacaatacctcttttattaaaaataaataacaataatcttgctcatattctccaattacaagctagtactgtgctcagcagagaggatgtgataaaatattctagtaaattaataccaaaatactaagttataacagaaatttctaaatatttagaaaatactttcaatttgtaggtttcttaattttactacctggtactgctgaatcaaaaattgatggtggcaatgagattttcaggtgaggcaacaatattttatgtcgctaaatttctggaattaccactaatttagagtgaagaatacagctcatctcaggactgtggaaagtttagattaagataaaacctcttgaaaaaactattttctaaattaccaaattctgaaaattttctaaaaaaagaggatctgaaactctttttttttttttgagatggagttttgctttgttgcccaggctggagtgcagtggcacgatcacgactcactgcaacttccgtctcctgggttcaagcaattatttgcctcagctttttgagtagctggaattacaggcacccgccaccacacttagttagtttttttatttttagtagagacatggtttcaccatcttggccaggttggtcttgaactcctgatctcgtgattcacttgcctttgcttctcaaagtattgggattacaggtgtgagccaccacacctggccctgaaactcttttatgcaaagaataaattactaaaaacattctacaaaaaaagagaatgaattatgtattcaagttatcctcaccaaagaagaccaggtttctgtagttctttaacatgacatccatataaaaattctgctgtgcagtgtcccggcaatgccactcctccagagagaattctatggccacatctctaaattgcaatggtcccgaaaagacacacatacacacattttcaccaagtggccataggcagaatttttaatttgacttaaggtgaaatgagagagtaaggagaactggttctgacttataggactgactaaaattatccagtaaaataatttttcaacacagaaacatacattctctgatgtattctctaactctgagaaaatagatccacaacatcagttcatctatttttccatataataaagtataaaattaaggccataaacacgaacatgcatttttgagtgctgtatttttatcatacagaatgagttgtgaacatttttcagatggaaaagacatgttgagttagaaggcacatctcaagttttgttttgttttgttttgagacggagtttcaatctagttgcccaggctgaagtgcagtgatgtgatctcagctcactgcaacctctgcctcccaggttcaagtgattctcctgcctcagccttctaagtagctgggattataggcatgcaccaccacacctggataattttgtattttcagtaggatggggttttctctattttggccaggctggtctcgaactcctgaccttggatgatctgcccgcctcggcctcccaaagtgctgggattacaggcatgagccaccgggccaggccaattttttgaatttctaacaagctcaccagtaatgccaatattttgacccaagaaggatattttgtcaaacatgcagtaagtggaagagcttgtgtttttcccagtttttctagcctgtaaacaaagataggagccttcattttccaaagagaaatatgtagaaaaaaataagaaaaaaggacagccaccagattaaatgtgatgctttatgcacatcagctgcgtaaagatacttaatatgaagagaaaaataattacagtgaaaaaaatccatcagagagctatttcaccaagtgaatcattaaccattaactgcactaggacaaatttttatgatgtgctaatgcacacagaagaacacagcatcactgttgaaatattcctccccaaaaaagtaaattatagtctgaatttaaccataaagaaacatcagttttatgcaaacttcaaaccacagataactcctatgttctgtaattttaagtaggcttaatttagcaccctagaaaacaggtatctcctaattatttatttcagaattttctgggtaataaatgccatcccgttttaataagcatttatttattttttttgagacggagtctcactctgtcgcccaggctggagtacagtggcgcgatgtccgctcactgcaacctctgcctcccgggttcaagaaattctctgcctcagccttccaagtagttgggattacacatgcccgccaccacactcggataatttttgtatttttaatagagatggagtttcatcatcttggcaaggctggtcttgaactcctgaccttgtgatccacccgcctcagcctttcaaagtgctgggaatataggtgtgagccaccgcaccaggcctaaataagcattttcttaatcctgttcttcatagagctaatggaacacactgttggaacctcaacattacatgttctccatctttactaaggaccacagttttccccaatagaaatcttgagtatccacatctttccatgttcaacagccacaagggagcatttttaatattgcagatcataaatccttactgataattctgcatggcatataagaagttatgatgtagagaatgtagagaaggctctgggatataggaaagaaatatttttcagagacccttgactatcataagaattttaagaagtagttaaaccaaactcattagggagaaaaacagaagtagagaagcaaagttttctaagtactaaacacatggcagtccaggaggcagagtggacacagctcttcatctgacacatgtttacctgaagaaaagccatttttttctttctcctgcttctatggaattcattctcagatgagattctccacacaaattacacctgcatatggagaatatgcctttaaaggtgtcagtaccacatgtttacctgctagcatgacatcaaatggcagaaaaaagaatttcattcatttctgtcctttaaaacagaagagattcaggaacaatgagctgctccgtgaagttaaaaatataagttcctcctttcctgtcctgaggtgccctcccctgccacagacaccagcaatttctgctacagtaacggaaatatgcaccacactgacctgttcctaccaaacccaaacagaacaggccctgtgaccaccctttagtgcaaaggtggaacttaactctcatgaatgtatttggaagtcctcatacctgattctggccttaccttagagtcacatgaggcccttcattaaaacaacatggatccttccacccaggacaataaacagaagctgtggggagggcacaggacatttccgctaattggccatgtgatcctaatgagaagcctgggctgataaccactaagctaagcattgcctctcaagctttaatgagcttatatatcacttggtaattttggccctgctttatgtagtgtgattctggaggactgaaaagggtccatgaatgggtgttttaaacaagttccctgtcaatgctgatgttgttccccctgggctcattgttagcattagttagagaagcaggaacagcacagggttgcttacactcagcactcttgtcacaacctaatatttctggtacaaataaggacaatgcatgtccatcctaaagttttatattctttgctggctctttaaagtttacagagaaaacagaaggcagcaatgtctcaataattctgtatttaaagaacaacatgggtcgggctctgtggctcacacctgtaatttcagcactttgggaggccaaggcgggtagatcacaaagtcaagagatcgagcccatcctggccaacatggtgaaaccccgtctctactaaaaatacaaaaattagctgggcatggtggcgcgtgcctgtaatccagccactcgggaggctgaggcagaattgcttgaactcaggaggcggaggttgcagtgagctgagattgcaccactgcactgcagcctagggtgacagagtgagactccatctccaaaaaaaaaaacaaaaaaacaacatgtacacatgtactaatgcactatttattaggcaggtactatgtgctcaagagcatgatagaaagcactgtgctgggcctaacacgttatgtgatttaatcctcgaaacaccttgggagctggcactaagtgtttaataatttccaggatttagataaagggcccagcattttttcttcttctgtttctctgtcatcaaaatttttaaaaaactgtaaagagtaaaagctaaatataggcagatgaaggagacatagaaaggaagagtttaacatagtttaaattttattctgtttacgtttacttttttgtgacttgtggaataactactggatctgcaggaagagaaaacaagttgctaaatgactctgcacgcactggttttaatagagaatttataaaatatgaccctaaaatacacactttgtttttcctgtttatgtttttgtgttccaggaaattgtgaacaccacttctagaaaggcagcaggattcaccagccaaaactctgatctcttctaatcagttctgtgaggccagactccaaggtagagtcagacctaaataaggcctccaaaaaggataaatctgaacaggtctggggcagggcaaggcccctatgtagaattctgttctctataccattagggtacttccagttttgttttttctaagctaacctaaaagaaacttaaatcccagagtttctctaattttaatattttctagccactgtcctgtcaactttatactatatactaatatgcaatttaaacaaatcccttatggtttcctagggtaattttattaaaaaataaatacgtacacttaacaaagtaaaataaatagaaattatatggccggcactgtggctcatacctgtaatcccagcactttgggtggccaaggttggtggaacacgaggtcaggagttcaagaccagcctgaccaagatggtgaacccttgtctctactaaaaatataaaaattagttgggcgtggtggcaggcatctgtaatcccagctactcaggaggctgagacaggagtatcacttgaatctgaatggcagagcttgcggtgagtcgagattgtgccactgcactccagaatgggtgacagagtgagactttatctcaaaaattaaaaagtaattagaataacaattcctctgttcataaatatcccttatgtgtagatgtcagaaatcacaacaatataaaggaagtggcccaaataaagcttaagattttggacacatctatttattgtaccaaccatatgatgcataatccaattatttatctggttgctagtctagactaaaagcttctgggttgtaggaaccatgactacttcatggttttttttttaatggccatatgagatggaagcaactagtttatctattcgggtctccagatctcctccttgtttatcatccaagtaccaggaaactggataaactctcatctgggtaccaaccaaagacacctcttgtatgaggggaggaacaaacacagatgactcatttctcttacactgagacagaagcagaattaaccatttttgtcaacctgacacaattctgttctggacatcctcaaatgcctcaaagacacctaggttattgtgagattattagatatcattgggctgatggcccaatgataagccaggctgcagactcgggctgtttctaaatagaaaatggaactgcactggtggagctccagaacttggatcacccgttctgatttgctagctcttgggtaaaagaaagaacaaaaatactctactccagtatcacattttacaggtaaatatagttgtggtcatggctctggatactttgtggccttgatctctcactccaaagatgcttatttacacttacagattctgccatcagattctatttcctcctggaacctctcacatcactgtagcaggtcaatgaacaagatgtgaaacatctcacagagccacattcccaaatgggggctgtaagctgtctttgctgacatctcacaaggcagaaaatgccatttgttagttctctgtacattcacaatccaaagaccagcccttttttgtaaatcccaggcagaggccagaccttatctgcagattctaggtaggatccacctggctctgcatcctttggtgttacagcaagtggagtacaatccgaggagagatcccctcatagaggctcctctagcacattctaaatgataagtctacatgaaataaaaaaaaaaagctgacacaacatcaatataagtagacagtttatttgggtcaagctgaaggattataatctgggagcaaagattcaagttgtctggaatctacactttgattggcatcagttacaagaggatttgtaaagataacaagagaagaacagagtaggtagacacaaagttgtttgtcagaaatttttatgtatttagagaaatagcatttattattgattagatatatatagttatggtttaggatatgggatatagtgtccaacgtgtcattattagtttaatttatagctacttttggcaatcgtgaacagtttcaagagatgaatacatagttcaaaggagggagaaataactgcactttcattttcatgtctctgagtttgataaccaaaggacttgcattttttagataaaagttttttatttcccaaatctcaagacctaaattcaaaatttggagctgcagatttaggggctgaaggactggagcagcagcagatgttacctgaacatttgtgagcactttagcaagaggagaaaggggaacgtggagattctcatgtctctatgtctactaatgcacatgttactgtgattgggtttctgggctaaatagtttttgtatcagtttcaggcctgaagatacaagagtcattgatagaggtaaaatgattgattgttgccctgtgaagtttgtagaaatgtggtctagcctctctagaagtgactctagaggactatagataccaaataggaagagacacaattctgcctccatatttaggggacagcatgcattttgaagtgcaaatgtgagttgactggaagcctgagaggaaaagtcccctctagagtaaattctggttggcaccttatgtgtttttatcatgtctggtaattctagacagtgtttggaaatgattaaaagaaaaattttctccagccccagagaaactccacaaaagtagcacagaaagaaaatggttttattacacaattgaacttaattgtgacatgcatcatcatcagtctgcttaagggatcgcaaagacagaaagatggtcaccataattagttcacaaatagaagaatttccagcgccatgtcatacatagttcatcctatgaacagattgaagaggccatctgtgtatgctaattgcttatattcaatgacaaacttttcacatcttcataacaggaagtagtttagtagctttaatccaggtgccttctgaaggtaggctttcattgtgctacaaaaatggttgaatagggttctatctttttggctatttacattttagagcagtggctctgtactccctggcattgggttacagcactcctgcttgctttctcctggttactagtggcctctttttttttttttttttgagacggagtcttcctctgtcgcccaggctggagtgcagtggcgcaatctcagctcactccaagctccgcctcctgggttcatgccattctcctgcctcagcctcccgagtagctgggactacaggtgcctgccaccatgcctggcctggctaattttttgtatttttagtagagacggggtttcaccatattagccaggatggtctccatctcctgacctcgtgatccgcccgtcttggcctcccaaagtgctgggattacaggcgtgagccaccgcgcccagcctagtgtcctctcttgacctataacatctgccactgaggcacagcctggagcacagctcacattttatatgaaccccatttgccacagcagcactctagtgtcacatcagagagtgaggcctgagctgcaggaggagagcctgcaggcctcctgggtagaattacaccttcacaatcatgagaatgtgattagtgtttcagcctcagtttctacctatagtagggacatggaaaaaatactgctgaatttccagcataagtccagatagaaatagctctaaaagttctcgctatgaaagtccacctcatgtagacaccatcggatatgaatagggcttttgaaacagacacccaaagcattggagagaaaaacagatctccatctgagccagattattttgagagaaaaaagttcaaaagatcttaagaaaaagctcatattagatataagattgatcagccagaagatattcccctaaaagcaatttctctgtaaacactcaaagtgcacagctactctcagcatgagaaacatgagccttatgaaaaaaaagtgcagtttttcagaagaattttatagcctttttcccatctttgctggtctgtcatctcctagccattaaattggggttctatattgaaatacatctgacaactttcaacaacactttttgatgaagaaatagaaactgactgtgttcatatagtggaacatattagaactggcaacatcgttaactgcagagctattatggtttttgggtggccacatcacctgtctcctgtaataacagcattccaatttagtaaaataaaagatacacaaattgtgtttactcacaattttccctattgaataaagcaataaacttgtcactaatatctactgtaaaaatttggtagtaaattttctttggatattagatataaagatctaagtatgaataattttaatgaaccggtcataatgtattcagtatttttaaaaattgcaactacatagctgggcatggtggctcatgcccgtaatcccagcactttgggagtctgaggcaggcggatcaccggaggtcgtgagtttgagaccagcatgaccgacatggagaaaccctgtctctactaaaaatacaaaattagctaggccaggtgtggcacatgcctgcaatcccagctactcaggaggttgaggcaggagaatcccttgaacctgggaggcggaggttgcagtgagccgagatcgcgccattgcactccagcctgggcaacaagagcgaaactctgtttcaaaaaaaaaaaaattgccactacagttaggtgcagtgtctcacacctgtagtcccagcactctgttaggccgaagcatgtggatcaccaggtcaggagttcaacaccagcctggcaaatatggtgaaaccccgtctctactaaaaatacaaaaaaaattaccttggcgtggtgcagcgcgcctctcatcccagctacccgggaggctgaagcagaagaatcgcttgaagccaggaggcagaggttgctgtgagccaagatcaagccactgcactccagcctggctgaaaaagcaagactccgtctcaaaaaaaaaaaaaaagaaaaagaaaaaaaattgcaactatacttcagttaaaacactttatatttcaaaagtataaataaaataaccatttaagcgattaattcaaagtaagtattgtggcttaatattcataggattgtagaatacagtgtttatggctcatgcctgtaatcccagtactttggaagagtgaggcaggtggatcacctgaggtcaagatcaagctggccaacatggtgagaccccatctctactaaaaatacaaaaacctacccaggcttggtgttgcatgcttgtaatcccagctgcacgggaggctgaggcaggagaatcacttgaacccaggaggtagaggttgcagtgagctgagatcaagccactgcattccagcctatgcaacagagggagactgtctaaaaaaaaactgaggtcaaaataagtaaacaaatcttttcaaggtacagatccaatcacccaccccatcctgttcacttacatgcgcaataaccaccctcccaggagacactgcactatgccccagtgagtgccccaggtgcattttactttgtaagttatttatgccatctcactggggtcagttttttgtcttttggagtgttttttcactatttttctgcccctcccacaagataatccagaagacagaaattatttgttttcccctcaataccagcatctgattgactgaccagcaatgtgtctcctagaaatgaaagccaggttgagtgaagacaatcttcatgtctcaaggggttagcttttcaaaaaaaaaaaagtgcaccagaagatgcctttcagccccaaggctgccacctgctcccttgaaagtctacactccatgcttcaggtggtcctatgggagaaaatgacccaagagataatagtcactagacactctagcagacatagccatagtgggtatgttggtttattcccagaaagtactaaaacccaggaccagaaaaaaactgaaggttggctgaggacacatcatcctacaaagtttccaaagggtaatcttgacccaaaaacattccggtaagttctctggaaaaataaaagaaaaagaggcgccagacacggtggctcacacctgtaatcccagcactttggaacgcagaggcgggcggatcacgaggtcaagagatccaggccatcctggccaacatggtgaaacctctctagctgggcatggtggcacatgactgtagttccagctactcaggaggctgaggcaggataattgcttgaacccgggaggtggaggttgcagtgagcccagatcgcgcggctgcacaactgtaggacctcactccagtctggcaacagagcgaaaactctgtctcaaaaagcaaaacaaaaaaaagaaaaaagaaaaagacacaaatattttttacaatacagtgtcaggggattattctttgctttcttctcctgggaaatatttacaaacagaaaacaaatattttcaatagtgttatgccatgctttttaaagaatgattaattgaggaacatggggtacacttgaggccctgcttgggacacatgtgaaaaatgccagggaaaaatcagttccctgtgaggtgtgaaaataattaattgcactttttgttaaattactatattaagggaaataaaattcaagcttacacaactataaactgccaattaagctctgaatcataactaggacatttccacctcgattgtacaaaataagaaactacgtaactatacctaaccaacgattgaatatggttttcttcatcatgcaccttataaatgtctttccttcaagcccctaccatggaccataaagtacaaactatagctgggtgctcaacaattcttgaatcactctttaattaaattatttgatatttttgcggcgactctcatattttttttttttagacagagttttgctctgtcgcccaggctggagtgcagtggtaagatatcagcccctgcaacctctgcctcttgggttcaagcgattctgtcacctctgccttccaagtagctgggattacagacattcgccatcacacccagctaatttttgtatttttagtagagatggggtttcctcattttgaccaggctcgtcttcaactcctgacctcaagtgatccgcccgcctcggcctcccaaagtgctaggattccaggcgtgagccaccgcgcaagggcccatacatttttaataggagaaaagggaaactgtgaagaccaagcaccaaagctcttcccattcatgaacttgcatcctgagtcaggattctcccctgaggaccctcccgtggtccctgcacgatctgggagacacgtggcgctgtgggtgcagagctgcccggagagggctccaggccagggcacagtcactgcgaggggaagagacaggacgccggggggcccgggtgtgagcgcagcctccatcttacggctgaaagggactgaggccgagctgggcaaggagaacttggggcgcagattgcggagctgactgcggggaggcctgagtcccgccacagccacttcccaccggttccaaccagttcctcccctgctctcgtgatgtccgacggcactcaccatttctaggcttccaggaggtcctggcgtcttagctgtggatctcccaaaaccgtcaggtcacagggctgggcctccagcagcagaggacacagagtagtgaagatgagacctggagctccaggtgcagtgagagacaaaggccccgccaaactcggaagtcgacctgttcgctccagctgggtgtctgattggacggtttccagcccagtgtccctgattggataatgcttaaggcctcgccccttcaggacctagtgagagaagatgtgataagatgctgcgctgagcaatgaaagagtcacagcctaagctgcatctttttcaggcagggctttctcccagagctgagccaggcccaccccagagcatgggaaaattctatctcttttttgctctctctttttgaatgtattcgaaaggtgaacggaagtactttgctgttatattaataatacgtaaaatttttgttcaagagaaaatcaacttttactttggtaatagtgtattatcaatactaaagctaattttaataaaaccttataaacaaatcaaatttgtcatttttgacctttcgagatttgcatatatattttgtaatctcttgtaatttttaaactatttatattttacttatatctacattccttttattttttcaatttgaaacaacctttaagtaatttcaaactgctataggagatagaaagcatttagggacagggactgtggctcacgcctctaatcccagcactttgagaggccaaggtgggcagactacttgaggtcaggagttaaagaccagcctggccaatatggtgaaaccccatctctactaaaaatacaaaaatttagccgggcatgctggtgcacacctgtggtcccagctactacagaggccgaggcagaagaatcgcttgaacccaggaggcagaggttgtgtaaggcccaaggggttcaccttgccctttgcctagacagagctgattcatcaagacaggggaatttgtggaggaaaagttaaatattaaatttgaactcaattgaacgtggacacaaacaatgatcaccaagtccaggaagaggttgtgtgagacctttgatgcattcatccagtgctgttttggagaaatctctatttccatctattcctatactttacttattgaaaaacgatagacaatcacaaaaacaagttgacctttttgtgttccttgagcccagtcactaagggccctcgtgactgggctttatgccaaataaaagagctgggatcccagatggcgccgaagtttcatgagacctctcctcgtctgtgcgtggacgagtggccgactctgaagcccaggctgtggcttcctggtctggtggtgaatcctccacagtctggggagtgtggtgtctgactctggatcccagggctggaaactcaaggacttcctatatcccagttctcccccttgtcatgccccatctggtgagttttgggggaactcatgacccaagtcataataggaatttcaggcctcataaagacatcatggttgaagcagaggtgttctgtttccagcaaagccctataggaagctaacaattgcttctagaaagaggtataagctttgccggcctatgacagtttctgggtccaaaacctgaaatgtacctcttcccatcttgtttctgcctaacgctccaattagcatgttgatctaggacagttacttgcagttctactggcccatcccgtatggagcatagatccagggccagcagcaccacttgtttagcttgttcagaagccatgctctccttctttccccagtgaaagtcatagtgttttctagtggctgcatgcagaggttgtaaaatgttacccaagtggggaatatgatgtctccagaatccaaacaagacaatacatttctgagcctcctttttagcagcagggatttcaaattctagtattttagccttagcctttgataaaatggactatttcctcccattccataggatgcaaccagctcctatcttgacacattaacctataagcagtaagcaaacaccatccactctgggagatccctcagcatctgctttgctgactggaatcccctgcagcccttcatgcacagtcaaaagtttaaattgcactaatttagattcccaattctcacaaaggccagttcccctggaccattcaactgccaagggggagaagtgggggatttcccatctctggatatgggaagtccacgagcctctagccccgtccttgtggccaaaaagtggcacactttggttttcgaatcctgtttgtgacaccaaaaatattcgggtgggaaacacatgaggggagaaggaaagacacacacacaacacctttaatggtaaacaagtttattccacgtaagtggcaatgcagatataataagcaaatgatataataaacagatcaatataacaagcatattgatataagaaccacattgatataataagcaaattgcaatgggaagaggagaaaggaaaagatatatatatatatatatatatatatatttacactcactagagtatggaggtttcaccaccaaggtggtaagcaacagcctgggttccagagtcggccactcatttctgcacagatgaggacaggtctcatgaagctttggcgcagtctggtaccctcagttttttgtaacgagttgtttggcaggaggtccagtcacgagggccttccgcaactgggcacaaggaacacaaaaaggtcaacttgcttttgtgattgtctattgtttttcaataactaatgtatagaaatagattgaaatagagatatcactgaaacagctctgaatgaacaactcagaaggctcacacaacctgttccaggacttcgtgacaattgtttgtgtccacgtttaattgagttcaaatttaatatttaacttttcctccacaaattcccctgtcttgatgaatcatctctgtctaggcaaagggccaggtgaaccccttgggccttacacaacctccgcctcctgggttcaagcgattctcctgcctcagcctccgtggtagctgggactacagatgtgcaccagcacgccaggctaattttttttttttttttttttttttgagacggagcctcgctctatcgcccaggctggactgcagtggcgcaatctcggctcactgcaagctccacctcccgggttcacgccattctcctgcctcagcctcccgagtagctgggactacaggcgcccgccaccgcgcccgccaccgcgcccgcctaattttttgtatttttagtagagatggggtttcactgtgttggccaggctggtctttaactcctgacctcaagtattccactcaccttggcttcccaaagtgctgggattacaggcgtgagccaacgcacctgtccctaaatgatttctttctatctcctataacagtttgaaattacttaaaggttgtttcaaactgaaaaaataaaaagaatgtagatataaataaaatatagttaaaaaattacaggagattacaaattatatatgtaaatctcgagaggtcaaaaatgacaaattttgtttatttacaaggttttatttatgtatttattcatttttggagacgcagtctcactttgtcacccaggcttgagtgcagtggtgcgatcttggctcaccgcaacctctgcctcctgggttcaagccattctcctgcctcagcctcctgagtagctgggaccacaggtgcatgccaccacgcccgggtaattttttgtatttttagtagagacagagtttcaccgtgttagccaggatggtctcgatttcctgacccagtgatctgccctcctcagcctcccaaagtactgggattacaggcctgagccaccgcacctggctttacaaggtcttattaaaattagctttagtattgataatacactattaccaaagtaaaagttgactttctcttgaacaaacatttcatgtattattaatatgacagcaaagtacttctgttcaccttttgaatacattcaaaaagagagagaatatgagatagaattttcccatgctctgggatgggatgctcagctcagggaggaagccgtttgaaaaggctccagctaggctaggcgcggtggctcacgcttgtaatcccagcactttgggaggccgaggcgggcggatcacctgagatcgggagctcgagaccagcctgaccaacacggagaaaccctgtctctactaaaagtacaaaaaattagacgggcgtggtgaggcatgcctgtaatcccagctacatgggaggctgaggtaggagaatcgcttgaacccgggaggtgcaggttgcggtgagccaacatcgtgccattgcactctagcctgggcaacaagagggaaactccgtctcggtggggggaaaaaagaaagaaaagaaagaaagaaagaaagaaagaaaaagaaagaaagaaagaaaggaaagaaagaaagaaagaaagaaagaaagaaagaaagaaagaaagaaagaaagaaagaaagaaagaaagaaagaaagaaagaaagaaagaaagaaagaaagaaagaaagaaaaggctgcagcctaggctgtcactctttcttcactcagcccagtatctgatcacatctgtcactcagcggctggggaggcggggccttaggcattatccaatgagggacgctgggccggaaaccgtccaatcaggcacgcagctggagcgaaccacatggtttctgggggcctttgtttctcgctgcagcgggagctccaggtttatcctcagtgttctgtgtcctgtgcttatagaggcccgtcctctgtggccgtgtgacctgcaagtattgggagagccacagctaaaccccgggacccctggaagcctagaaatggtgagtgccgggtccaacgtcccgagagaggggagaggctgtttggaacggtgggaagtggctctggcgggactctgcttcctcacagtcagctccacaatctgccgccggagttctccctgcccagctcggcctcagtccccttcagccataagatggcggctgcggtgacatccggggcccggcacagtgattgtgccctggcctggagccctctttcagcagctctgcacccgcagcaccgcgtctctcccagatcatgcaaggaccacgggagggtcgtcaggggagaatcctgactcggttccctgcgggttcatgaatgggaagagctttggtccgtgaggttgttagaaacaagcgcttggtgccgcaaaacaacacaaaacaaaaaactacccagcacttagaaaatttcacaggaaggcatatttacttctgaagaagagtgctgctcgcgtccgacctgatcgcaagagcacacagaagaaaggaaggaaggttttttttttttttgaggcggagttttgctcttgtggcccaggctaaagtacaatggcgcgatctcggctcactgcaacctccgtctcccgggttcaagtgattctcctgcctcagcctcccgagtagctggggttacaggcatgcgtcaccacacccggctgattttgtatttttagtagacatgccgtttcaccatgttggtcaggctggttttgaactcccgaactcagttgatccgcccgcctcggcctcccagtttgaaaggggtttttaaccctaaacgccgttattgcctctgtgtccttcccccattggccggggtctgacctcacaatctaggctgacccgattggctactttccaaataaggaaggggttcgggtcgcagattggaacaggcggtttgggttgtttacggagcgggtgtctaggtacaaagaggtacaaaaaagttggtcctaagaacaaggaacaagaaagttaggcccttgaagaggaatctattatatctgtcagggttcacagtttcccttttctcctattaaaaatttatggggccgggcgcggtggctcacgcctgtaataacaacacttcaggaggtcgaggtggatggatcacttgaggtcaggagttgaagaccagcctggccaaaatggggaaaccccatctctactaaaagtacaaaaattagctgggtgtgatggcgaatgtctggttttctgtttctgcattagttttctgaaataatggtctacagctttattgatgttattgcaaaggacatgatcatttatttttaaatggccagagagtattccatgatatttatgtaccatattttgtttttactaaatcttttattttattttatttttggagacagagtgtcacttattgcccaggctagagtgctgtggagtgatgcagccttatttagcctcaacctccctggctcaagcaattctctcctacctcatcctttcacgtagcttgatctacacgctggtgttaccacgcctggccaatttttctctttgtattttctgtggagacaggattttgcaatgttgcccaggttggtcttaaacttctaagctcaggcaatccacctgcctcagcctcccagagtgctgggattacaggcatgagccaccgcatctgaccataccgtgttttctttatccagtctaccactgatagggcctgtccatgtctttgctattgtgaatagtgctgcaatgaacatacatatgaatgtatctttataatacaataatttatatttctttgggtatatacccaattatgaggtagagtataagcattcccttttctctgcaaccttgccagcatctgttattttttgactttttaaaaatagccattctgactggtgtgatgtggtatctcattgtggtttctcttaatttctctaatgattagtgatgagctttttttttttcatatgcttgctagccacatgtatatgttcttttgaaaagcatctattcatgtttttttggcctattttttaatgagattttttttttcttgtaaacttgtttaagttcttaataaattctggatattagacttttgtcagaggcaaagtttgcaaattttttttattctgtaggttgtctgtttactctgttaatagtttcctttgctgtgaagaagctctttagttcaaataggtcccattgtcaatttttgcttttgttgcaattgcttttggtagcttcatcatgaagtgtttgccagtttctgtgtctagaatggtacttcctaggttatcttgcaaggtttcttacaattttaagtttttcatttaagtctttaattaatcttgagttgattttgtatattgtgtaatgaaggggtccactttcagtcttctacatagtgctagctagttattccagcaccatttattaaatggagaattctttccacatttctcttatcagctttgccaaaaatctgatgatggtaggagggtggcattatttctgggctctctattctgttgcattggtcttgtgcactcatgaacttttttttataatatctttctctcttctgctttttcccccataagcattttttcaagtgcatacagtgtgtaaaattctgatgtccaagagttcaaaaactctttaaaaagttccaaaaaaggggattggggggctaggggagggacagcattaggagaaatacctagtgtaaataatggtttgatgggtgcagcaaaccttcatggcacgtgtatacctatgtaacaaacctgcacgttatgcacatgtaccccagaactttaaagtataataaataaataaaaagcttaaaaaatattttgatattctctcttttcttaaggaatttaggttatatgtagatgcttttctctgctttttttgaaatacatgtaaatcatatgaacagctaaataaaccctttgtcattttctcgggtccagattatctttatgtagtacttcagaattattgctttatttttgcttctgaaaagtttatttttttcatttttagtcctttaaattagacacagatttgtttagataaaagctcattttaagagcacacagaagcttagcagaaagataggattaaatttagcaatgcagaatgctaaagactaaaaggtattaagtttcttttacagaaacctgattatccaaggtaattatccaatatttgcaggctgaagtacttatactgcaaaagcaagaacagtgcataaacagtggagtctgtagttgtatcttgctttctatttattacttcagaacaattaggatagttatgtgtagggtttgtaggcaaactgcattaatataaattaaacattttttttttcgaggtgttttgctcttgttgtccaggatggtgtgcaatggtttgatctcggctcaggcaaactctgcctcccaggttcaagcaattttcctgtctcagctcccagtagctgggattacaggcatgcaccaccaggcccagctcattttgtatttttaatagagatgcggtttttccatgttgatcaggctggtcttgaactcctgacctcaggtgatctgcctgcctcagcctcccgaagtgatgggattacaggcatgagccaccatgcctggcctttttttttttttttttttttttttttaaaaaacagtcttactctgttgcccaggctggagtgcagtggtgtaatcttggctcactgcaatcactgccttctggtttcaagtaattctcctgcctcagcctcccgagtggctgggaatacaggcatgcaccaccatgtccggctacttttttgtatttttagtagagacaggatttcaccatgttggtcagactggtctcgaactcctgacctcaggtgatgcacctgcttcagcctccaaaagtgctggtattaccggtgtgagccaaaaacaatattttctacaatagtatgaacataaagccacaatacttactttgaatgattcacttaaatggttattttaatattgttatttatacttttgaaatataaagtgttttaactgaagtatagttgcagtttttaaaaatactacatacattgccgagtgcagtggctcacacctgtaattccaacactttgagaggctgaggcaggttaattacctgaggtcaggagttcgacaccagcctgacatggtgtaaccccatctctactaaaaataaaaaattagctgggtgtggtggcacgcgcctgtaatcccagctacttggcaggctgaggcaggagaatcgcttgttcctgggaggcagaagttgcagtgagctgagattgcaccatttcactccagcctgggtgacagaatgagattgtgtctcaaaaaaaaaaaaaaaagctacatatattatgacctgttcattaaaattattcatagttagatatttatatctaatgtccaaagaaaatttactaccaaattgttagagtagatattagtctgacatgtttattactttactcaataggaataattatgagtaaacacaattttattatcttttatttcactaagttggaatgctgctattacaggaaaaataaagacaggtgatgtggccacccaaacaccataatagctattcagttagctgtgttgcaagttgtaacatattccactatatgaacacagtcaaattctatttcttcatcttaaagtgttgttggaagttgtcagatgtatttcaatatagaacccccattcagtggctaggagatgagagagcagcagagatggaaaagaaactttataaaattcttctgaaaatctgccctctttcttcgtaatgctcatgtttctcatgatgagagcagctgtgtactttgggtggttagagagaaattgcttttaggggaacattttctggctcatttgatcaatctgatatctaacctgagcttttttaaaagatcttttttacatttttctctcaaaataatctggctcagatggagatctgtttttctctccaatgctttggatgtctgtttcagaagccctattactatcctatggtgtccaaatgaggtggactctcacagtgagaacttttggagctatctctatctggactcatgctggaaattcagcagtattttttccttgtcaccattacaagtagaaactgaggctgaaacactgctcacattcccatgattgtgaaggtgcaattctacccatgaggcctgcaggctctcctcctgcagctcaggcctcactctgatgtgacactggagtgctgctgtggcaaatggggttcatataaaatgtgagctgtgctctgaactgtgcctcagtggcagatggtagaggtcaagagaggaaggacactagcattcaggagaaagcaagcaggagtgctgtagcccagtgccagggagtacagagccactgctttaaaatgtaaatagccaaaaagatagaatgctactcagccatttttgtagcagagtgaaatcctgccttcagcagacacctggcttcaagctgctaaactacatcctgttatgaagatgtgaaaagtttgtcattgaatataagcaattaacatacacagatggcctcttcaatctccaggtgaatttaggatgaactatgtatgacatggtgctggaaattcttctaattgtagactaattatggtgaccatctttctgtctttggagcctcttaagcagattgacgatgatgcatatcacattcaagttcaattgtgtaataaaaccattttctttcttttgtcttattgtgaagattttctggggctggaggaaatttttcttttaattattgtttccaaacactgtctagaattaccagacatgatacaaacacataaagtgccatccaaaatttactctagaggggactttccctctctggcttccagtcagctcagagttgtgcagcaaagtgcatgctgtcccctaaatatgcaggcagaattgtgtctctgcctttttggcatctatagtcctctacagtcacttctagagaggctagatcacatttctaccaacttcactgggcagtgatcaatcgttttatctctcttagaatgactcttgcatcttcagacctgaaactgattcagacatcatggagctcacagaccgaatcagagtaacgtgtgcattgaatagatgtgtagacaagaatctccactttcccctttgtctttttgctaaaatccttacaaatgtgcaggtaacacctgctgctactccagccattcaggtcctaaatctgcagctccacattttgaatccaagtttttgagatttgggaaataaaaaacttttatctgacaaatgtaagtccttttgattatcaaactcagagagacgttgaaaataaagtgcagttatgtatttctcctccctttgaactatgtattcatctcttgaaactgttcactattgtcacaggtagctataaattaagctaatagtgccacattggacactatatcccataccctaaaccataactatatatatatatatatattattatatatatatatatataatcaagtttatttctgttaataaataaaaatatctgacaactttgtatcagcccactgtgtccctgttttgttgtctttaccaatcctcttataactgctgctaatcaaagtgtagattccaggcaacttgaatctttgctcccaggttataatccttaagcttgacccaaataaactgtctacttatattcatgttgtgtcagcttttttttctttcatgtagacttaccatttagaatgtgctagagcagcctctatgaggggatcttttctttgattgtattccacttgctgtaacaccaaaggatgcagagccaggtggatcctacctagaatctgcagataagttctggcctctaccacagatttacaaaaaagggccggactttggattgtgaacgtacagaaaactaacaaaaggcattttctgtattgtgagatgtcagcatagacatcctacagcccccatttgggaatgtggctctgtgagatttttcacatcttgttcattgacctgctacagttatgtcagaggctctaggaagaaatagaatctgatggcagaatctgtaagtgtaaataagcatcttaggagtgagagatcaaggccacaaagtatccagagccatgaccacaactatatttacctgtaaaatgggatactggagtagagtatttttgttctttctcttacccaaagagctagcaaatcagaacaggtgatccaggttctggagctccaccagtgcagttctgttttttatttagaatcagcccgagtctctccagcctggcttatcattgggccatcagccctgggacactgggaattctctcacagtctcctaggtgtatttgaggtatttgaggatgtccagagcagaattgtgtcaggctgaaaagtgtggttaattctgcttctgtctcagtgtaagagaaatgagtcatcctgtgtttgttcatcctctcatacaagaggtttctttggttggtaccaagatgagagtttctccagtttctggtgcttgaatgaaacaaggatgagatctggagacccaaatagataaagtatttccttacatctcatataaccattaaaaaaaatgaagcagtcatggttcctacaatccagaaacttttagtctagattagctactggataaataattgaattatgtgtcatatggttggtgcaataaatagatgtgtccaaaatcttgggctttatttagaccactttctttatattgttgtgacttgtgatgtctacacctgtagggatattcatgaacagaagaattgttattataattaatttttggttttttgagatagagtctctgtcgcccaggatggagtgcaatggcgggatctcagctaactgaaacctcggcctcccgggttcaagtgatactcctgtctcagcctccagagtgtccgggattacaggtgcccaccaccatgcccagctaattttttgtatttttagtagagatagggtttcaccatgatggtcaggctggtctttaactcctgacctcaggtggtctgcccgcctcggcctcccaaagtgctgggattacaggcaggagccaccgcgcccagccacatatttattttctaataaaattagcctaggaaggcctggtgcagtgcctcacacctgtaattttagcactttgggaggccgaagcgggcagatcacaaggtcaggcgttccaaaccagactggccattatggtgaaacgctgtctttactaaaaatacaaaaattagctaggcatggcggcacacgcttgtagtttcagctactcgggaggatgagtcaaaagaacagcttgaacctaggaggcggaggttgcagtgagccaagatcatgccagtgcgctccagcctgggcgacagagctccaaaaagaaaataaaaattaccctagaaaacctttggggatttgtttaaattgcatagtagtgtatagtataaagttgacagggcggtggctagaaaatataaaaattacagaaacaggccgggcgcagtggctcacgcctgtaatcccagcactttgggaggccgaggcaggtggatcacgaggtcaggagatcgagaccatcctggctaacacggtgaaaccccgtctctactaaaaatacaaaaaaattagccgggcgtggtggtgggcgcctgtagtcccagctacttgggaggctgaggcaggagaatggcgtgaacccgggaggcggagtttgcagttagccgagatcgcgccactgcactccagcctgggcgacagagagactccatctcaaacaaacaaacaaacaaattacagaaactctgagatttaagtttcttttagataagcttagaaaaaacaaaactggaagtaccctagtggcatagagaacagaattctacatagggttctcaccctatcctaggtctgttaagattcaccctttttggaggccttatttaggtctgcctctatcctggagtcttgcctcacagaactgatcagaagagatcagagttttggctggtgaatcctgctgcctttctagagctggtgcttagaatttactgaaactcaaaagcagataaatcagaaaaacaaagtatgtattagagggtgttagtttttaagttttctatgaatccagtgctaacagagacattctatttagcaacttggtttctattcctgcagatccagtagttgctcctcaagtcacaaaaaaagaagtaaatataaacagaataaaattttctctaaactacattaaactctttctttctttctttcttttttgagatggagtgtctctctgtcgcccaggctggagtgcagtggtggatctcggctcactgcaagctctgcctcctgggttcacgccattctcctgcctcagcctcccaagtagctggaactacgggcacccaccaccacgcccggctaattttttgtatttttagtagagacggggtttcaccgtgttagccaggatggtctcgatctcctgacctcgtgatccgcccgcctcggcctcccaaagtgctggaattacaggcgtgagccaccgcgcccagccattaaactctttctttctttatcttgaaatctgtctacatttagcttttattctatgtaatttttttaaaaagttgatgatggagaaacagaggaagaaataaaaatgctgggccctttatctaaatcctggaaattattaaacccttagtaccagcttccagggtattatgagaactaaatcacataatgtgttatgcccagcacagtgctctgtatcatattcttgagcacattgtacctcattaataaacattgcattagtacatgtgtacatgttgttttttaaatatagacttattcagacattgctgctttctgtttcttctgtaaactttaaagagccagcaaagaatataaaactttaggatggagttgggttgtctttatttgtaccagaagtatttggttgtgacaagagtgctgagtgtaagcgaccctgtgctgtgcctgcttctctaactaatgctaacaatgagcccagggggagcaacatcagcattgacagagaacttgtttaaaacacccatttatggacccttttcaaacctgcagaatcatattacataaagtggagtcaaaattatcaagtgatttataagctcattaaaactttacaggcagtgctctcattcatgagagttaagttccacctttgcactaaagggtggtcacagggcctgttctgtttgggtttggtagggataggtcagtgtggcacatatttccattactgtagcaaaaattgctggtgtctgtggcaggggagggcacctgaggacaggaaaggagaaacttatatttttatcttcatgaagcagctcattgttcctgaatctcttctgttttaaaggacagaaaagggtggactttttctgtgttttttttctttctgccatttgatgtcatgctagcaggtaaacaggtggtgctgacacttttaagggcatattatcaagatacgggtgtaatttgtacagagaatctcgtctgagaaggaattccagagaagcaagagagggaaaagtggcttttctgtttcagatcaagagctgtattcactctgcctcctcgaatgctatgcatttagtactcacaaacttttacttctctacttttgctttttttttaatgagtttggtttaagtacttcttaaaattcttatgatagtcaagagtctctgtaaaatatttattttctataccttagagccttctctacatttgctgcatcatagcttcttatatgccatgcaggattctcagcaagactttataatctgcaatattaaaaatgttcccttcgtggctgttgaacatggaaagacgtggatactcaagatttctattggggaaaactgtggtccttagtaaagatggagaacatgtaatgttgaggctccatctgtgtgttccattagctctatgcagaataggattagggaaatgcttatttaaaagggatggcagttattacccagaaagttctgaaagaaaattaaggtacctgctctctagggagctaaatgaagcctacttaaaattcctactaaaagttacagaacataggagttatctatattttgaagttagcataaaacatgtttctttatggttaaattcagattttatttactttctttgggaggaatatttcaacagtgatgctgtgttcttcttcttcttctttttttttttttaagaagagtttcactctcattgcccaggctggagtgcaatggtgcaatcttggctcactgcaacatctgcctcccaggttcaagcaattctcttgcctcagcctcctgagtagctgggattacaggcatgtgccacaacgcccagctaattttgtattatcaatagagacggggtttctccatgttggtcaggctggtctcgaactcccgacctcaggtgacccacccatctcggcctcccaaagtgctgaaattacaggcgtgagccaccatgcctggccgatgctgtgttcttctgtgtgaattagcacatcataaaaatttgtcctagtgcagttaagggttaatgattcacttggtgacatagctctctgacagatttttttttacaatagagttaattatttctctcttcattaagtatttttatgcagctgatgtgcataaaccatcacacttaatctggcgtctatcctttcttctcttttttgctacatatttttctttggaaaatgaaggctcttatctttgtttacaggccagaaaaactgggaaaaacacaggctcttccatttactcaatgtttgacaaaataccgttcttgggccaaaaacattcgcattagagatgagcttgtcagaaattcaaaaagtcagactttatgccagatcttccggaataaaaaaaaaccctgcacaacaaggtcttcagcttattgtgtatattaaaatttgagaggtgccttctaactcaacacatcttttgcatctgaaaaatattcacaactcattccatatgatgcaaatatagcactaaaaaatgttcatgttcatgcccttaattttatgctctattatctaaaaaatatcatatataaactgatgttatggatcttgtgccgctcttttttctcagagttagaggatacattagagaatatttttgggttgaaaaatattttattggataattttaggcagtcctttgagtcagaaccagttctctttactctctaatttcaccttaagtcaaattaaaaattcctctcatgccatttagtaattatgtgtgtgtgtgtgttttccagggaccattgcaatttagagatgtggccatagaattctctctggaggagtggcattgcctggacactgcacagcggaatttatatagggatgtgatgttagagaactacagaaacttggtcttccttggtgaggacaacttgaatatataattcataatataccctgaagattttatttctcttttttgtagaatgtttgttagtaatttattctttgcaaagtggtagaattacaggcataagccactgcgcctggccatattttatttatatttctgtataatttttattatgaccacaaagataaccctgtaatcaataacaatttaattgtacattcacaataactaaaagtgtataattacactgtttgtactacaaaggataaacgctagaggtgatggataccctatttaccctgatgtaattactacatattgtaggcctgaatcaaaatattccatataaggcataaatatatacatatactgtatgcccacaaatactagaataaatttcagtaagaacaaagaataaaaatttaaccgatgggaaaaatgttcttcaactcatttgcagtttaaagtcactggcaaagtgattactagacatgatattccactatgtaccaaatagtatattgctaccatgttttacctacatgcttgagtaaggtgggatatgtcaaagttggtagcataataatgcttcattaagcaaacaatagtcttaacatggtaaaaaaaaattaaataaaattaagttcacacataatctaataatatttaaatgtactgcattttattacataaaaatgcaattagtataatatacaaatttgatacttttaactataatttttctctttaatgtagaaaagtatttctctgaacccccaccttattttttatcattgtttattaataaagtaattcattatgtttttgaaaaaaagttttaaaatgttctgcgtacatgttaatgtaggctaggccatccaaaagacaaagcaaagcatcaacattaagtttgagaaatgagaacatgaacccctacctcatacattacttagtataagttaactacaaagagcctctccacttacattttcatcatgcatcttacattttaatgtccttactcttttatagaaaaagtcacaaataacgcccaataaaaaagaatctgtagtatctctgatgcagcaacaattgatcacatgctttcacttgtgaatacaataggaataaaataacagcataaagtaatctgaaaactgtattcactctaaattagtggtaactccagaaatttagtggcataaaatattgttgccccacctgaaaatctaattgctaccactaatttttgattcagtagtatcagatagtaaaataagaaacctacaaattgaaagtattttctaaatatttagaaatttctgttataaattattattttggtattgatttactggaatattttatcacatcctctctgctgagcacagtactagcttgtaatgggagtatatgagcaagattcatgttatttatttttaataaaacaggtattgttgtctctaagccagacctggttacctgtctggagcaaggaaaaaaacctttaactatggaaagacatgagatgattgccaaacccccaggtaggtacgagtgaaaacgaatacaacagatgacacagataaaaggtcccaatgtcaaagagaaaaccagtctttaaaatgtgattctggaagctgtgttccaaaggaaataggtcctgggcagctgtttttttttttttttttttctcccacaaaggggcatcttctgtcttatgcttttaaattctctaagaattctacttctcctttggtgagcttccttcaggttcacagtgagagccaaagtcctcttcatggcatgtaaaaggctgcgcgggctaggagtggtggctcacccctgtactcccagaacagtgggaggccaaggcaggtggatcacgggaggtcagaagttcgtgattagcctgaccaacatggtgaaactccgtttctactaaaaatacaaaaattagctgggcgtggtggtgggcacctgtaatcccagctacttgggaggctgagtcaggagaatcatttgaacctaggaggtggaggttgcagtgagccgagatcatgccatcgcactccagcctgggcaacagagcgagactccatctcacaaaaaaaaaaaaaagagagaatgagaggctgcacagtctggctgcttttccattgttttggggacacacaaatatctgcataattttgagaaactaaaactatttttttaagtcctctttttgcatcaggtctgaaatgcgtgagagtattagtttatcttgcattttttttgtttatttttctgcacagtccattctgtttttatttctataaagtcttcaaatatagattgaaattgtaagtatgatattcttctgctttgttccttttcctcaagactgttttggctattcaaagtttattttagtttcatgtaaattttagaattgaatttccattactgtgaaaaaaatactgcaattttgataggaagtgtattgaatctatagatcactttggataatatggcactttattaatatttattctttcaatccaaagacataaaatattttaaaatttatttggatcttccttttttatttattttttattgtaaaggttttttacatccctggttaatttttttctcagaaatttattatgtaatgctatagtaaataagatttttttctctattttatcagatagtttgttttaagtgtatgaaactgtagctgggcgcagtttaagtgtatggaaccatagctgggggtggtctcccaaagtactagatcacgcctgtaatcctagcactttgggagaccaaagtgcatggatcacctgagatcaggagttcgagaccagcctgaccaacatagagaaaccctgtctctgctgaaattacaaaaattcactgggcatggtggcgcatgcctgtaatcccagcaactcgttaggctgagatgggagaatcgcttaaacctggaaggcagaggtttcagtgagccgagatcaccccattgcacttcaggctgggcaaaagagctagactcctactcaaaaaaaaaaaaaaaaaagtgtatgaaaccatacatatacttatgtatgttaattttatgttttgctaatttactgactgtatttattagtttagacagggtttaatatactgtttatggttttttaaatatgtgattgtatgatctacagacagcaactttttacttactgtttttcaatttcaatggatttttttttatttctttgactaattcttctgccacatacttccagtgctacattaaaatagaagcatcggctgggctccctggctcacacctgtaatcccaacatgttgaaagggcaaggcaggtggatcacctgaggtcaggagttcgagacaagcctgaccaatatgatgaaacctcgtctttactaaaaatacaaaagttagccgggtgtggtgacatgcacctgtaatcccagctccttaggaggctgagacaggagaatcgcttgaatcagggaggcggaggttgcagtgagccaagatcacaccattgcactccagcctgggcaacaagagcgaaactccgtctcaataaaaaaaaaaaaaagaagaagaagaagcattgacaatgggcacaatatagttttgtattggtatctaaatttgatggagcaaacacctcttcaagttttcataaactgattttagaaggtaaagatcttcttttattgggcccttagggtgatgagatattctgtgaatttttagtgaagaggggttgtagcttggtcacaaggctgctgggtctacctttgggtccacctttagttggcttgctacaggggcttgggtagttgtaattccattttatttttagacagaccgaatatccttacaggttcaagcagttctcatgtctcagctttgcaaggagctgggattacagatgtgagtcacggtgtccggccttagtgtaggtttcttaacatcagtttattgtgtcttggttttaatttgtattacaattttagacaatttgcaattctgtttgtacactttaagtcaatttgaggtttaattaagagataaattgctggatgcggtggctcacgcctgtaatcccaacactttgggaggctgaggtgggtggatcaagaggtcaggagttgagaccagcctggccaacatagtgaaaccctgtttccactaaaaatacaaaaaattagctgggcatggtggcgggcacctgtaatcccagctacttgggaggctgaggtaggaaaattgcttgaacctgggaagcagaggttgcaatgagccgagattgcaccattgcactccagcccaggcaacagtgcgagactccgtctcaaaaaaaaaaaaaaagataaattatgcatgtttattacaatcagattacatatgtatgtgtgtttatctataaatatgaccccaattttagttatggcttatcttatattctttcttagctgattttccatggtagttttatcttaagtgagcagtcattgagatagttttattttttccatgtgtttaatgatgaatatatatttccttttgtgagaaaagcacttttgtgatttgaaggtaattttcaaaaggatttataattctgtatttttttctgtttttctttaaaacttgttttaaaaacacataacataaaatttaatgtcttaaatctattgaagtgtacatttcagggccaagtgtggttgtggctctcatctgtaatcccaggattttgcgaggccaaggcaggaggatccctggagcctaaaagtttgagagccgcctggggaatatatggagacctctctctataaaaaaaatttaataatagccaagcatggtggtgtgcacctgtggtcccagctacttgggagattgagagggattcaaaattgtgccactacattgcaggttgggggacagagtgagaccctgtctcaaaaaaaagttgttcatttcaggcatgttaagtatattcacactgttatgcaaaagacttctagaaactttacatcttataaagctaaaacttaattcccattaagtaacaactgctcattttaccctctctccagccctgacagacaaaccttcaactttctgttttatgatttttgactacttatgatacctcatatagctgggtgtggtggcttacacctgtaatcccatcactttgggaggctgaggcaggcagatcacctgagatcgggagtttgagaccagcctgaccaacatggaaaaaccctgtctgtactaaaatacaaaaaaattagccaggcatggtggcgcatgcctataatcccagctcctcgggaggctgagataggaaaatcgcttgaacctgggaggtggaggttgcagtgagccaagatcgggccattgcactccagcctggtcaacaagagtgaaactccatctcaaaaaaaaaaaaaaaaaagatacctcatataagtggaatcatatagtatccataattttgttactggtttaattcaggtgacataatattctcaatcttcatcttaaaatgtgacaagatggttatttttaaggtggaataatattccatcatatgtatatgttacattttttgatatgtttataaatcaagggacatctgggttgcttcagccttttgacttttgtgaatactggtacaataaacatatattttcaaatatgtcttccaggtcctgtgttacatattttgtttcttttgttgtttgttatttttatttttattttttttttgagatcgagtctcccgctgtcacccaggctggagtgtagtcgtgtgatctcagctcactgcaacctctgcctttggggttcaagcgattctcctacctcagcctcccaagttcctgggattacaggtgcacgtaacatcacccatctagtttttgtatttttagtagacatggtgtttcaccatggtggccaggctggttttgaacttctgacctcaggtgatctgcccaccttggcctcccagtgtgctatgattacaggcttgagccactacacttcgcctgtgttatgtattttagatatagatttataaataaggaacatttctaacattttaaaataatggctgcatcattattttccaccagcagtcaacatgggtttcatttttattgcatcatcaacagatttggtgtatcaaaaaaaaattatagtggccattctaatgggtatgaggtgattttgtttgttatgtttcttttttcatttctctacaaattagtaattttgtgtgtgctttcaaatgcattttccaattttgtgtatttttttgagaaaaatttgtccatttctaaatcaagttattcaaatttactgttagttttaagagtcatttatatattttgaatattaactcttttaacaagtaatatgtaaatgttttcaactattttctaagggacgttgtcactcctgaaatttttttctttcagaaattttgaagtatagtgtagttaaacttttttgttcttttatttgttgctcatacatttaatgtcgtacctaaaaaaatggtgccaagaccaatgtcatgtcttttttttgtattctttctttctttctttctttctttctttctttctttctttctttctttctttctttctttctttctttctttctctttcttttctttctttctttctttctttctttctttctttctttctttctttctttctttcttcctttcttttctttcttttctttcttttctttcttttctttctttcttttcttagatggagtcttgctctgtcccccaggctggagttcagtagcgcaatctcagctcactgcaagctctgccttctgggttcacgccattctcctgcctcagcctcccaagtagctgggactatgggcgcccgccaccatgcccggctaagttttttgtatttttaatagagacggggtttcaccatgttagccaggatggtctcgatctcctgacctcatgatccgtccgcctcggcctcccaaagtgctgggattacaggcatcagccaccgtgcccggcttgttttgtattttttctaaaatatttgttagtttattttgtctaagtattttatttaaaatgtatttttgtatcattcaaggaaataatccaactttattttatcagtgttgatactgtagcttttaactgttgtattgacatctttgaacaatgaaattttttgacccctgagcaagaatgttgaagtgtgttttatattcacatgcttttgaatttgccatttgacttttgcttttaattcctaatttcattcagtttttgttagaaaacacacagtgtataattttagtcttttaaaattgttttgttgttgttgttttgagacaagatcttaccgtcatccaggctggagtgcagtagcataattttggctcactgtagcctcagtctcctgggctcaagtgattctttcacatcagtttcctgagtagctaggattacagacatgcactaccatgtctggctaattgtgtgcttgtttgtagtgttaggatgtcaatgtgttgcccaggctggtttcaaacttttggccccaggggatcctgttttcttggtctcctaaaatgttaggattataggcaagagccactgttcccagtattttaaaatttaataaaacttgctctgtgtcctaacagaatacaccagatgcaaataagaatattgtgtattatcttggttttgactggagagttttgcatgtgtctgtgaagcctagttggtctataatatgggttggatattcatgttgtccaaacctcatgctgcaatataaatcctcaatgttggttatgggacctggtgggacacgtttggatcatggggcaaatttctcatgaatggcttggtatatcctcttggtaaccaaaaacttttcactctattaattcaaatgagagctggttcattaaaagaacctgggtccttcacctcacacttgctctgtctcttaccatataacatgtccagttactctttaccttccaccatgattttaagcttcctgaaatcctcaccagaagcagatgctggcacacacttcttatacagtctgccaaactgtgagccaaataaaccttttttctttataaattatgctactctcaagtattcctctatatgcaaaataattaatattgtctataatgttagctaagtttttttcttattttttatctgaattttatatttattactgcaaatggagtcttgatgtctacaattattatgttgccatgtatgtcttgcttcacttttgtcaatagttgctttatatattttggagccctgatgttatatacacacatttatatagatagataaatattacgattatagattcctgctaaatcaactcactttactataaaataataccagtctatgtctcatggtagtatttgacttaaggcatattatgtctaatataattatgaccacatcactcaattgtggttactattttcatggaatatacatttttttttcattttttattttcagcctatttgactcaatgcaaaatgagtctcttgtaggcagcgtactgtatgctttttaaaaaccactcaggcattctatttttttatatataattttatttatttatttattttcttttgtgatggaatttcactcttgttgctcaggctgaagtgctatggtgcgatctcagctcactgcaacctatgcttcccgggttcaagcaattttcctgcgtcagccttctgagtagctgggattaaaggcatctgctaccacacctggctaatttttttgtatttttactagtgacagggttccaccatgatggccgggctggttttgaatgcctgacctcaggtgatctatatattgtccttcttcgtctttttgaagttttgacttaaagtacattttataaaatatgacagtttttgactttaagatgtagcttgtgtaatattattttgacctcttctgctctcatttggttaatatttacatgaaatttctacttctgtcttgccactttcagtctttgtcattagatctcaggtgactcttgtagaaaggcaagttggatcttgatttttaattttttttttttttttttttttagaagaagtctcactctgccactcagactgcagtgcacttgttcaagtgattctcctgtctcagcctcctgagtagctgggattacaggcatgccccaccacgcctggctaatttttgtatttttagtagagatggggtttcaccatgttgatcaggctgataaaattttttaataaacctttttattgaaagtatgtttcttgactggaaagataattatatatatttaaatagttttccgaaagagaaaaacttactaatgttatctatttatttatttatttattttgagacggaatcttggtctatcactcaggctggagtgaaatggcacaatgttggctcactgcaacctctgcctctaaggttcaagtaattctcctgtctcagcctcctgagtagctggtattataggcacccaccaccatgctggctaatttttggtatttttagtagagatggggttactccatgttggccacgctggtcttggactcctgacctccagtgattcacccgccttggtctcccaatgtgctgggattacaggcgtgagcgactgcgcctggccaacgttattttattgttttatttgattcttttatctttgtctctttttctctttctgtctttttgtgttttttttttatttttgtattgatatgcttttaatttttttcttattttcttttgtgtatctaggcaggtagtttcttagtggtatctaggggattacataaaacctctaaaagatccaacaatatactttaatgcagtaaaaaattaacttcagttgcatgcaaacattcttcattacatctgccttcaactttgttattgattttgctaattctacttatgttatatattcattaacagatgtttataataattcctctacttccatcttttgcattttagagaataactaaaagtgctttctgtgccattatgataataagtaaggaattctatttttgtgtatgtgcatatcttctccagaaagttatgtattttcatatgatcatgtgttgttttcttgtattatgttattttcagtggaagaaacttctttcagcatctttgataggtagggcatatgcagtgccaatatactttcttaggatttggttattttggaaggactcctttttatatgatagtacaattttgccgatggtattattttctgcaaaaattttttttgataaattcactggttatcttataagactatgcttataaatgacacatcatttttatcttgcagcacccaaaattcttttcttatctgtgatttttgaaattttgcttataggtgtgtttgtgataaatatctttttgtgtatcctagtttgttcagcttcttcatgtttacattattttttcttttaagaaatttttaagttatttttatattttttatatccataatttttgtttttttctattttaatattttttcttgtttatcctcatttttctgatcttcagtagtcgtctgtgttcctatttcacttactgaatatcattcaatttcttttatgtaattaattaatttatttattttctgagacagagtctcactctgttgcccaggctagagtgcagtggcatgatcttggctcactgtaacctacccctcccaggttcaagtgagtctcctgcctcagcctcccagtagctgggattacaggtgcatgctgccacatttggctgatttttgtatttttagtagagataggctttcactctgttggccaggctgatcttgaactcctgacctcaaatgatccacccaccccagcctcccaaagtgctgggattacaggcatgagccactgttcctgtcctactttattttttttttgagacaggcttgctctgttgcccagcctggccagcagtggtacagtcactcactgcaagcttcccatcttgggttcaagcagttctcgtgtgtcagtctcctacgtggctgggattacaggcacatgccaccacgcccagctaatttttgtatttttagtagttacagggtttcaccatgttggccaggctggtctcaaactcctgacctcatgtgattttcctaccttggcttcccaatgtgttagaattacaggaatgagcttccaagcttggcctgttcaatttattctgaattttaaaaattactttattcactttttatggctgcttttgaaaattttataatttttttgatgggccatgctgcccaaatattttgtatacattgtaatctttgagtgagattcaggcattaacaaaaagctacctgtgccaatctttataatatagttttgtccttgtgtagtctgaaatcaattgttttggctagagattctgggaatttctcaaacatgtttttaggatgtgtcttgtctaaaattttgtgtttattgtttagttaaatcggcttattcatatttcttcctaataatcagtaatcacttgctacagccattcctgtttggattactgcagtttctctgcttctgtaacatttacctttagactcagcagactcaaactgtcattctaacatatcactgtttcagcattttatgtcatgggagacattagccggtgtctaaaaaagttcatagatgccagaaataaagatgtatgtgccaatatttttcttatttttaaaaaagaaaccaggagttggcaatttatatttgtgtgtgtgtgtgtgtgtgtgtgtgtgtgtgtgtgtgtgtgtgacagagtctcactctcttacctaggctggagtgcagtggcaaaaatcttagctcactacaatctccgtctccacagttgaagcaattctcctgcctcagccttcaggtagctaggattacaggtacctgttaccatgcctggctaattttctgtatttttagttgagatggggtttcaccatgttggtcaggctggtctcagtctcctcaccttaggtgatccacctgccttgccttaccaaagtgctggggttacaggcattagccatcatgcctggccaacaatttaatttttttttttttttttttttttttttgagatggcgtctcactctgttgcccaggctggagtgcagtggtgcaatcttggctcactgcagtctttgcctccctggttcaagcaattctctgccgcagccctccgagtagctgggattaaatgtgcccgccaccatgtctggctaattttttgtatttttagtagagacaaggtttcaccatcttggccaggctggtcttgaactcccgacctcatgatccacccacctcagcctcccaaagtgctgtgattacaggcgtgagccaccatgcccaactggcaatttacttttaaaagcacaatgttatactgggcagcaggaagagctgtgttgggtataactaacagagctttctttttcttctatgtggctatttgcattctgctcacctggagcccttcacacacttaactcatttataaattttttacaattttatttttgtcactatgtttttgttacatttatgtgtccaggaagaaatcagaactggtggtattttgctatgtcatcttgcttatgtagtttgtataattttataggttagatttgtaatgtatatttatctgagtctagcaattgaagtaatgtgtttttattgtttcttttagttatgagttctcattttgcccaagacctttggccagagaacatacaaaattctttccaaatagggatgctgagaagatatgaagaatgcagacatgacaatttacagttaaaaaaaggctgtaaaagcgtgggtgagcataaggtgcacaaaggaggttataatggacttaaccaatgtttgacaactacccagaaagaaatatttcaatgtgataaatatggaaaagtctttcataagttttcaaattcaaacacatataagacaagacatactggaataaatcttttcaaatgtataatatgtggcaaagcttttaaacggtcctcaacccttactacacataagaaaattcatactggagagaaaccttacagatgtgaagaatgtggcaaagcttttaaccaatctgcaaaccttactacacataagagaattcataccggagagaaaccctacagatgtgaagaatgtggcaaagcctttaagcagtcctcaaaccttactacacataagaaaattcatactggagagaaaccctacaaatgtgaagaatgtggcaaagccttcaaccgatccacagaccttactacacataagatagttcatactggagagaaaccctacaaatgtgaagaatgtggcaaagcctttaagcacccctcacacgttaccacacataagaaaattcatactagagggaaaccctacaactgtgaagaatgtggcaaatcctttaagcactgctctaaccttactatacataagagaattcatacaggagagaaaccctacaaatgtgaagaatgtggcaaagcctttcacctatcctcacaccttactacacataagatacttcatactggagagaaaccctacagatgtagagaatgtggcaaagcttttaaccattccacaacccttttttcacatgagaaaattcatactggagagaaaccctacaaatgtgatgaatgtggcaaaacctttacctggccctcaatcctctccaaacataaaagaactcatactggagagaaaccctacaaatgtgaagaatgtggcaaatcctttactgcatcctcaactctaactacacataagagaattcatactggagagaaaccttacaaatgtgaagaatgtggcaaagcttttaactggtcctcagaccttaataaacataagaaaattcatattgaacgaaaaccctacatagtgaagaatgtgacagatcttttaaatgttcctccacttttaattagcataagataattcatactggagagaaaccctatgaatgtgatgaatgtgggaaagcctttaaccagccctcgactcttagtaaatttgagagtttatatggaacacaaaccctacaaatataaagaatgtgacaaagctttttaaggaagttctcaacccttattacacataattcataccaaacagaagccctacaagtgtgaagaatgtggcaaaacctataaacctataacaagttctcaattcctttttttttgagatggagtttcactcttgtcaccgaggctggagtgcaatgacatgatctccgttcactgcaatctctgcctcctgggtttaagccattcttctgcctcagcctcccaagtagctgggattacaggtgcccaacaccacgcctggctaatttttggatttttagtagagatggggtttcacaatgttggccaggctggtctcgaactcctgacctcaggtgatccacctgccttggccttccaaagtgctggggttacaggcgtgagccaccatgcctggctacaagttcttaattcttaagagacaccatgcctggctacaagttcttaattcttaagagacatggcgataattcatgctgaagaggaaatctggaaacctgaaagatgcgacattgcttttaccaacacctccacatttcctatacataaaaataaattatactagtgtaataccctagaaatgtataaaatgtgacaaagcctttatatgattgtcatacatgattgtaggtgatagaagtcatactgccaaaactcctgtaagtgtgaagaatgtggcaaaatattttattagtgcttataccttatttcacaggaaagctcttatccttgagaaaaattgtgcaaatacaaagaatatggaaaaaccattaatgcctactcacatcttactgaacagaagaaggttcatagttaataaagcattaaaagtgcaattactgtcaaaaaatctttcagaaaatagaagtctttaaagtgaagaatatttattctgaagacagccattacaaatataaagggggttgtagtgcctttacttgtgtcacagatcttagtgcacacatgtagtactagaggaaaaccctgaagcagttgctcaagctttgtttcagggaatcaagggaatttatattgagaatagtactgcaaatgtaatgaatggaaagacttttcttttccaaaaatgacagcttagaaaacaccagagggtttataccaaaatatatttttgcagatgcagtaaatatcaaaaaatatttaattcaaaattgattctatgtaaatatcagagaattttccatagaataattaaggcactgacacttcagacattacactaaatcagaatgttcagtataaaaactaatccacagctacagctgttagataaattatttctatataattttttaaaaagtggatttttgaagcactgtaattacattgaaagtatacttgttttcttgaaaaaatttttttgaaaagtgaataatgatataatacagctttcacattgctttatgctattttattcctattatattcacatgtgaaagcatgtgatcaattgttgctgcattagagatattagagattgttttttattagttgggcattatgtatgaccttttctataaaagagtaaggacattaaaatgtaagatgcatgatgaaaatataagtggagaggctctttgtagttaactgatattaagtaatgtgtaaggtgggggttcatgttctcatttctataatcctagccaatgacttaatgttgatgctttgaatgtcttttggatggtctaacctacattaacatgtatgcggaacatcttaaaactttttttcaaaaatcataatgaattattttattaataagcaaagataaaaaataaggtggggtttcagagtaatgcttttctacattatagtgacagaaagaaattattaattatagttaaaaatattaaaatacagccaggtatatttattggtttagacaggttttaatataatatttatggttctttaaatataaagttgtatgggatgggtgcagtggctcatgcctgtaatcctagcactttgggaggctgaggcagatggatcacttgaggtcaggagatcgagaccagcctgaccaacactgagaaaccccacctctactaaaaatacaaaaattagctgggcatgatggcacatgcctgtaatcccagctattcaggaggctgaggcaagagaattgcttgaacgtgggagttctcagattacaggtgtgcgccaccatgcctggttaatttttgtatttttagtagagacggggtttcaccatgttggccaggctggtcccatactcctgacctgaagtgattcgcccacctcggcctcccaaagtgctgggattacaggcataagccaccgcaccctgcctatttttttcttactgaaatttattattagtatttgtgggtatattgtatgtgtatatatttatgccttatatggtatattttgattcaggcatacaatatgtagaaatttcattagggtaaataagatatccgtcacctctagcgtttatcatttgtattacaaacagtgtaattatacacttttagtgcataatttaatgaagcaggtggattgcctgaggtcaggagttcaagatcagcctggccaatatggtgaaaccccgtctctactaaaaatacaaaaattagctggacgtggtcgtgcatgcctggaggctgaggcaggagaattgcttgaaccctggagggacagttttttaaataagattaaggactgaggactggttggggctcataaatgatatgagtaaagtgttagctaaaacagaagaaaaaggggtgcccaaacaagtcaccttaaaatttgatgcctgtgctgtcattaatagtaataagttaggaataaggtgtggttctcttaattagaaaagaggctatatggcagaaaataaatacaactgtcataaattagcactgtgtggaaataaatgtgaacactggtcttgtgtcatttaggccacttggattaaaaaaaaaaatgaaaaagatccatcccaccttcagaaaggaaaaaatggcccttcctgtactcagggacaatgtaaccccttagagctagtcataaccaatccccttgatcctcgctagaaaaaaagaggagcatgtgaccttaggaatcgacggggccagactggatccttgagtaaatatcttggttcgagaagcttacaaagactctcctgagccagtgtttcaaactttctatgatgaactaaatgtgccagtaccagaaattccaggaaaaacaagaaatttgtttttgcaattagccaagcatgtagcccagtctctcaatgtcacttcatgttatgtatgtggagaagctgtaataagagatcaatggccatgggaagcctgagaattagtacctacagtacctgatgaattcctggctcaaaagaatcaccctgataatttctgatcctaaaagcctcaattattaaacaatattgcatagctagagaaggaaaagaattcactcaccgcgtaggatgacttagttgtcggagacagaaactgtataatggtaccacaaaaacaatcacttggtggagttcaaatcacacagagagaaaatttagtaaattctcaaagttgcaaactggacccacctggagtcccaccgggactggacagcccccactggattatactggatatgtaggcatagagcttatgacagattactgaccagtaggcaggtagttgtgttattggcactattaaaccatctttcttcctactgcccataaaaacaggcaaactccttggcttccctgtctacgcttcccgcgaaaagagaatcatagctataagaaattgaaaaaatgataaatggccccctgagagaatcatacaatattataggcctgctacttaggcacaagatggctcatggggataccggacccccatttacatgatcaaccgaatcatatggttacaagctgtcttaaaaataatcactaataaaaccagcagagccttgactattctggcctggcaagaaactcagatgagaaatgctatatatcaaaatagattagccctcgactacttgccagcagctgaatgaggggtctgcaggaaatttaaccttactaattgctgcctacacatagataatcaagggccagttgttgaagacatagttagagatatgacaaaactggcacacgtgcccatgcaagtgtggcatggatttgatcctggggccatgtttagaaaatggttcccagcgctaagaggatttaaaactcttataataaaagttataatagtaataggaatctgcttactgctcccttgtttgctacctgtacttcttcagatgataaaaagcttcattgttaccttggttcaccaaaatgcttcagcacaagtgtaatatatgaatcactatcgatctgtcttgcaagaaaacataggtagtaaaaataaaagtgagaactcccactattgagagtctcaaagtgggggaataagggaggagaccacccctcatattgtcttatgcccaatttctgcttccaaagaaagaaaaagtaaaaactaaaaggcagaaatgaaatccacaagcagacagcccagcgccacaccctgggcctggtagttaaagatcaacccctgacctaatcggttatgttatctacagattacagacattgtatagaaatgcactgtgaaaatccctatcctgttttgttctaatctaactaccggtgcatgcagcccccagtcatgtaccccctgcttgctcaatcaatcatgaccctctcacacacatccccttagagttgtgaacctttaaaagggacaggaattgctcacttggggagctcagctcttgagacaggagtcttgccaatgcccctggctgaataaaccccttccttctttaactcggtgtctgaggagttttgtctgtggctcgtcctgctacaccctctccagaatcatgggccatagttccaggggagaacccttccaaactaaagctaagaaaatttacctatcttccatctgttctgttactccttctccttttccccttctattgctaatcctctcgttattaatgtaactaggttgggctcaccccaaactatttcctttagtgcttgcctcattatgccctgtgaaaatctccagagtcaaaaacagctctcagcctcagagaaatatctctgtcacttttggacaagaggctccccctaacacgactcctgttctttaacaaatgtaaaaaaaacaggcctgccacagctggaatgatgttttataaacaatcgaatatcagggctggacctcatcaacaagtggttgtatgtccttaaagccatatatttgctttgctaaaggaaacactccttccaattgccagtttaaccaatgtaatctggtgcaaatttctattctcacccccacttctatggatcctaaccccactttgatttgagctgcttctatggcataagacccaacttggctggcacaaatctcatagggtctttcaaaatgcgtctaatcatccctcatgctcttcactcccctctcttctaagctcttttctaaccagactgtcatatcttctatgcccagtgataagactaaaatagatattgtaaaagtaactaatttaaggcaaactttaacaattaaaacaagataccaagatacaaatgcctggttaaaatggatcaaatattctgtgcacacattaagcaaaagcaattgttatgcttgtgcacgcggccagccagaggcccaaattgtccctttcccactcagatggtcttctagttgaccaggcataaactgtatagtagctcttttccaagaccccacagcctagggtaataaatcctgctgagctctctctctgctatttcttaaagtccaacaccctgtgggtcaggccccaagagccatccagcctccatctcctagcgtcaattttacctcgtgtctctcacgacaaggggaaaacttggcatttcttggagacttaatgggatacagtgagcttaagcctttccaagatcttaccagtcagtcttcccttgttcatctttgagcaaatatatggtggtattgtggtggacccttactggacactctgccaagtaactggaacggcacttgcactgttgtccagttggctatccctttcactctggcatttcatcgactagaaaaagaaaaaccacaacactgtaaaataagagaagccccttatgtgtcttttgactttcaagtttatttagacacaactggagtcccacgggtggtacctgatgaattcaaagcccaagatcaaatagctgcaggatttaaatcaatatttccacgggtaactattaataaaaatgtagattagatagataaatcacatctattataatcaatattagtttattaattacaccagaaatgctgtcaaagaaatagccaaccaattaaggcctactagccagataacttagaaaaacaaaatggccctggacataatattagctgaaaaaggtggagtttgtgttatgattaaaactcaaatgttgtaccttcatcccaaacaatactgcccccaataggaacataagaagggccttacacgaacttaccactttatccaatgaattagctaaaaattctggggtcaataacacgttttcagaatggctagagaggtggttcagtaaacgaaaaaaagtcatagcctcaattcttacttctcttatagttgtaataggtgtactaattcttgttgggtgttgtgtcataccatgcatctgtgggctagtacaaagacttataaaaacgacacttacgaaaacctcccttagttctcctccaccttattcagataaacttttccttttaaaagatcaagtcaaacaacaaagtaaaggtatgtttaaaaagttttaaaaagcgtgtggtcgcagtggctcacgcctgtaatcccagcactttgagaggctgatgcgggcggatcacccgaggtcagaagttagagaccagcctgaccaatatgaagaagccccatctatactaaagacacaaaattagctggtcgtggtggcacatgcctgtactcccagctactcgggaggctgaggcaggagaattgcttgaacctgggaggcaaatgttgtagtgagccaaaatcgtgccattgcactccagcctaggcagcaagagcaaaaactccatctcaaaaaaaaaggtttttttttaattataaaaattaaaagggggaaattgtaaaatacaataaaattcctcttcaaaggtttagtcttaactttcttgttctttgttctcaaactcaacttgcttgttctccatgcctccttgcccctagttactgtaacaaccttccttcccaacagctctaatcaataattcacatctgttcccttgattactcactctgcagccttcccacccttcaaaaccacacgtcccaccactgtgacttatacatgccccttcccttccttatttggaaaaatatttacaaatagccaatcgggtcagtttagattgtggggtccgaccctagcccatgggggagtaacacagaggaagagactttacgttaaaaataaaaaccccttccctcctttgttcagggtgctcttgcgatcgtgattaatgcaaacaaaaaccttttgcagaagtaaattgccttactaaaaaaacttttgcctgagtactggtttcactttgcgacaccaaacactttacttccaacggtattattaatatgacaacgaaatacttctgttcaccttttcaatacattcaaaaagagagagtaaaaaagagaatgttcccatgctctggggtggacgtggctcagctcagagaggaagccctggctgaaaaggctgcagcttaggctgttactcttcttcactcagcccagcatgtgatcacatcttctgtcactcaggtcctgagggggcgggaccttaagaattatccaatcagggacgctgggctggaaacgtccaatcaggcaagcagccggaccgaacagggcggcttctggtttggcgggtcctttgtctctcggtgcagccggagctccaggtctcctcttcactactctgtgtcctgtgctcctacaggcccagcctctgtggccctgtgacctgcaggtattgggagatccacagctaagacaccaggacccctggaagcctagaaatggtgagagtgccggtccgacatcccaagcgacggggaggggctggttggaaccggtggaaagtgacggtggcgggactcaggtatccccttagtcagctccacaatctgcgccggagttcttgcccagctcggcctcggttcccttcagccataagatggcggctgcgcttatagcgcagcccccaggcgtcctgtctcttcactgtgcggtgactgtgccctggcttggagccctcgctgggcagctgcgcacccgcagagccgcttctctcccagattgtgcagagaccacgggagagtcgtcaggggagaatcctgactcggagtgcgggttcacgaatgggaagagctttagtgggttgggttcacagtttctcttttctcctattaaaaatttatggggctgggcaaggtggctcactcctgtaatcgcagcagtttgggaggccgaggcgggcggatcacttgaggagttgttagggcagctaagttcctcttcagagactcaacttcctggtcataagttgtaaaaattgtaaatcaaccctaccccttctttttccccattctccttttctcaaaacatcgcgcgtttaccctatatggaaaaagtttgtgtctagcccaaccaggatcagcttagattgtgcggtgggacctcagccaatatgggaaggacacaaaaaccggaactgcgttagggttaaatccccttcctggcccagcgcggtggctgatgcctgtaatcccagcactttgtgaggccgtggcgggtggatcacaaggtcaggagttctaggccagcctggccaacatagtgaaaccccgtctctactaaaaatacaaaaattagccgggattggtggcaggcgtctgtaatcccagctacttgggaggctgacgcacgagaattgcttgaacctgggaggcgaggtgcagtgagccgagagcttgccattgtactccagccttggtgacaaagtgagactccgtcttaaaaaaaaaatagacatcttaaaatttccttcccttatgtaaatactgtgtttgagtaatttcacggatttttcaaacactgagtttcaaaaaccaagtgaataactctgacatgacaaagcttgagcctagtgactccaagctaaggctaatattaagcctaaaacagaaggttttttttttggacagagttttgcgttttgctcttgttgcccaggtggagtacagtggcgcaatcatggctcactgaaatctccacctcctgggttcaagcgattctcctgcctcagcctctcaagtagctgggattacaggcatgcaccatcatgcttggctgattttgtgtttttagtagagacgggttttctccatgttggtcaggctggtctcgagctcccggcctctggtgatctgcctgccttggcctcctgaagtgctgggattacaggcatgagccacagggcccagccaacaggagtttataaagtcctatttagctttttctggggagcctcccctgcagatgtcccagcctattcaccggagccatggaaggaggcgttattctgagagaaggtacagagccccagaaagctggggccccacaagcagatgcagttaaggttaagatgaaaggaaactgggaggatcttttttttttttttttgagatggagtctcgctctgtcgcccaggctggagtgcagtggtgcgatctcgactcactgcaagctccgcctcccgggttcacgccattctcctgcctgagcctcccgagtagctgggactacaggcacccaccaccacgcccggctaattaaaaaaaatttttttaatagagacggggtttcaccgtgtgagccaggatggtctcgatctcatgacctcatggtccacccgcctcggcctcccaaagtgctgggattacaggcgtgagccaccgcgcccggcctttgggaggatcttactgacgatgaagttgttattgttttgaggaacattttagactttgtaaaataaaaacgttaatttatgtaaaagatgaatttcaaaaaagtattacaacaggaggaagtaccaactaactctaaaatctttatggcttgcaaaaatgtaggcagaaaagggcttttctccctagggaggagcaaacaagattagaaaggaggtgggaggggaatggcaaatggagggtgaaaaagtcagattttacatcagagaatgtcttaccctgaaatcagcatgttcttaggagggatgtaaagtggggctgtatgttgactcagagtgagggtagctcaaagttcaggagcctgaggaagggagataaacctaagtaaagtttgattaggaaatattttattttaggcctggcccggtggcttatgcctttgggaggccagcactgggattaccagtgctggtaatcccagcactttgggaggccaaggcggacaggtcacgaggtcaggagatcgagaccatcctggccaacgtggtgaaactccatcgttactaaaaatacaaaaattaactcagcatgttggcgcccacctgtattcccagctactcaggaggctgaggcaggagaatcgctagaacccgagaagcagaggttgcagtgagccagatcaagccacagcactccagcttggcgacagagcaagactctgaaaacaaacaaacagaaaaaaatatttcaggccaggcgcggtggctcacacctgtaatccgagcactgtgggaggcagaggcaggcggatcacctgaggttaggagttcaagaccagcctggccaacgtggtggaaccctgtgtgtactacaaatacaaaaactaggcgggcgcttgtaatcctagaaacttgggaggctgaggcaggagaattgcttgaaccctgcaggcagaggttgcagtgaaccgagattgcgccgctgcactccagcctgggcaacagagcgagattctggctggaaaaaaaaaaaaaaaaagaaatattttattttgaccaccgaagacaaatacagctgatttttttttttttgaatgagaaataggagaaaatgtgcagagtgtgtgtctggctgtgtgataggtaagaaaagagagcactaagtcataagggaaagagtttttctataaactgtttctggagcacacaaaggacggagaattgtattaatcacaaatattttccaggattatctatgtgtttcatctttccccatctcttttctttgttctatgcatttcttccttttggcttttcctgggctgcatcttatatatgaaaccagtaaacataactacagtgttttgctgagttctgtgagtagctctaccaaattgttgagtttcgtggaggtgataggagtccccagtttttaaacagcagctcagaagcatagatgggcccatggggtttgtgtctggcatctgcagtgaggacaatgttgtggaactgagccctgaatcagggtctgtgctgtgtgtggtgtcagaattcaaatgttagacaatgagttggtgttggagaattgtttgatgttcagcaaactacagatttggtgccagaaaaaggatatcatggagccctagcctggaataaaactctgggtgtttgggaatgggagtctctgctctcctctacacaggctgtcacgctgcccattgtcctgaaattccaggtcttctcccagggtgagagatgactgaaaacttagagaaaatgagctctgatgacagactcccttttctcacagctgccaccacaggattcccacccactcacaaaaacacacacactagacattgacatgtccacacttctcccagaactatgcactaccctcaggaacctcaccgtggcatttttgatctgtgtttttttcaaagaattcacaagtgtctacaagtctcctggcatatccccacccccagacactgaatctgcagcagcaacctgttttctccaccaacctagggtctggaccacctgttcataatctcacctgcctgcattcgcacggaaacaaatcagggtacagccccacttgggccactatctgtagcaaaaatcagtcctttcacctacattgtgctctctctcactcagggatttttttttttcttttagcttttatttttggtttgaggtacccatgtgggtttgttatacagctgaaattatgttatggggatttggtgtgcagattattttttcactgaggtactaaacatagcaccaaacaggtatattttctgatcctcttactcctcccaccctccaccctcaactaggcctcagtgtctgttgtttttctctttgtgtttatgggttcttattatttagctctcccttgtaaataacaacatgcatttggttttctatttctgcattagttttctaagaataatggtctccagcttcatcaaagttattgcaaagaacatgatttttttttaaatggccacagagtattccatgatgtttatgttccatattttgtttttgctaaatcttttatttttggtctcacttatggcccaggctagagtgccatggcatgctattggcttactttagcctcagcctcccaggctcaaggaattctctcctacctcatcctcccaagtagctgaaactacacatatgcattaccacacctggccaattttttttttttccgtggagacagaattttgccatgttgccaggctggtctcaaacttctgagctcaggcaatccaccagcctcagcctcccaaagtgctgggattacaggcatgagccaccgcatctgaccatactgtattttctttattcattctaccattgataggcatttatggcctgtccatgtctttgctgttgtgagtagtgctgcaatgaacatgaatgtggatgtgtctttataatataataatttatatttcttcggcctgacagggtatatacccaattataaggtttctgggtcaaatgataattctgttactagttctgtgaggaatcgccacactgctttttacagttgttgaactaatttacactcccaccagcggagtataagcatctcctttctcctttctctgcaccttgccagtatctgttaccttttgactttttaaaaatagccattctgactggtgtgcggtggtatctcattgtggtttttctttaatttctgtaatgattagtgatgaacttttttttcatatgcttgttagtcacatgtatgcctgcttttgaaaagcatctgttcatggttatttttgcctactttttaatgaggttgtttggttattcttgtaaaattgtttaagttcttaataaattctggatattagacctttgtcagagacaaagtttgcaaatgttttcctttatttggtaggttgtctgtttactcagtttcttttgctgtgaaaacctctttagtttaaataggtcccatttgtcaatttttgcttttgttacagttgcttttcgtagcttcatcatgaagtctttgccggtttctgtgtctagaatggtatttcctagttatctttcagggtttcttataattttaagtttttcatttaagtgtttaatttgtcctgagttgatttttgtatatgatgtaatgaaggggtccagtttcagtcttctatatagtgctaggtagttatttgagcaccatttatgaaataagtaattcttcccacatttctcttgtcagctttggcaaaaatctgatggttgtaggagggtgtcattatttctgggctctctattctgtcggtcttgtgcactcatggatttttttataacatctttttctcttctgctttttcccccataaagattctttcaggtgcatctagtgtgcaaaattgaggtgtccaagagttcaaaaattctttaaaaagttcccaaaaaaattttgctattctctcttctctttagggatttagattatatatagatgttttttctgctttttaaaacatatatgtaaatcatactaacagctaaataaactttttgtaattttttctgaccccagattgtctttatctagtacttcagatttattgctttgttttggcttctgaaaagtttattttttccatttttagtccttcaaagtagacacagatttgtttagataaaagctcattttaggagcacacagaagcttagcacaaaaataggattaaatttagcaataccgaatgataaagactaaaagatactaagttccattgacagaaacctgattattcaagttaattatcaaatatttgcaggctgaagtgcttatactgcaaaagcaaaaacagttcagtgtgtaaactgaacagtggagtctgtagttgtgccttgctttctatttattacttcagaacaattagcatagttatgtgtagtatttgcagacaacctgcattcatataaatttaacagcattttcttttctttttttttttttttgagacagagtctcactctgttgcccaggctgcagtgcagtggcatgatctcagctcactgcaactgctgcctcctgggttcaagtgattctcctgcctcagcctcccgagtaactggcatgcatcaccacacctggctaagcttttgtatttttagcagagatggagtcttaccacgttcgccagcttgatcttgaactcctgacctcaggtgattcacccaccacagcctcccaaagtgctggaattacaggtgtgagccataaacagtatattctacaatagtatgaatataaagctgcaatacttactttgaatgaatcacttaaatggttattttaatattgttatttatacttttgaaatataaagtgtttgaagtatagttgcaatttttttaaatgctacatacattactactggtacattaaaatattcatacttatttatatctaatatccaaagaaaatttactaccaaagtgttacagttagtctgacatgtttgttactttattcaatggggatcattatgggtaaacacaattttagtatcttttgtttcactaaattggaacgctgctattacaggacaaataaagacaggtgatgtggccaccaaaaaccataatagctcttcagttaactatgttacaaggtctaatatgttccactgtatgaacacagtcagattctatttcttcatcaaaaagtgttgttggaagttgacagatgatttccatatagaacccccattcaatggctagaaaatgagactgcagcagagatggaaaagaaactttataaaatttttctgaaaatctgccctctttcttcataatgctcatgtttctcatactgagagtagctgtgcactttgggtgtttagaaataaattgcttttaggggcgtattttctggctgatgatcaatcttatatctaatctgagctttttcttgagatctttttaccttttttctttcaaaataatcttgctggccgggcgcagtggctcacgcctctaatcccagcactttgggaggccgaggtgggcagatcacctgaggtcaggagttcgagaccagcctgaccaacatggagaaaccccttctttactaaaaatacaaaaattagccaggcatggtggcacatgcctgtaatcccagctactccagaggctgaggcaggaggatggcttgaacccaggaggcggaggttgctgtgagccgagatcgcaccattgcactctagcctgggcaacaagagtgaaactccgtctcaaaaaaaaaaaaaaaaaaaaaaaaaatcttgctcagatggagatttggttttctctctaatgctttgggtgtctgtttcagaaatcctattagtatcccgtggtgtctgaatgaggtgggctgtcacagtgagaacttttgaagatatgtctatctggactcatgctgaaaattcagaagtattttttccatgtcatcattataagtagaaactgaggctgaaacactgctcacattctgattattgtgaaggtgaaattctatccatgacgcctgcaggctctcctcctgcagctcagacgtcactctctgatgtgacactagagtgctgctgtggcaaatggggttcacataaaatgtaagctgtgctctgggctgtgcctcagtggcagatggtagcggtaaagagaggacactagcaactaggagaaagtaaacaggagtgctgtagcccagtgccagggagtacagagccactgctctaaaatgtaaatagccaaaaagaacactattcagccatttttgtagcagagtgaaagcctagcttcagcagacacctggcttcaagctgctaaaccaactcctgttatgaagatgtgaaaagtttatttgtcattgaatataagcaattagtatacacagatggcctcttcagtatccaggtgaatttaggatgaactatatatgacatggtgctgaaaattcttctacttgtggactaattatgatgaccatctttctgactttgcagtctcttaagcagattgatgatgatgtatgtcacattcaagtttaattgtgtaataagaccattttctttctgttctattattgtggagtttctctgaaaatagagaaaatttttcttttaattattgtttccacagagtgtctagaattaccagacatgatataaacacataaggtgccaaccagaatttactgtagaggggactttccctctcagactttgagtcagcccatacttgcgcagcaaaatgcatgctgtccattaaatatgcacgtggaattttgtctctgcctatttggtattgatagttcctctactgtcacttctagagaggctagacccaatttctacaaacttcacagggcagcaattaattaatcatttaacctttttcagtgactcttgtatcttcagatttgaaactgattcagaaactatggagcccagaaacccaatcagagtaacatgtgtgtgctgagtagacatagagacatgagaatctccactttccccttcctcctcttgctaaatgctcacaaatgtacaggtaaacacctgtggctactccagtcgttcaggccctaaacttgaagctccaaattttgaatccaggtcttgagatttgggggaaaaaaaaacttacctaagaaatgcaagtccctttggttatcaaactcagacattaaaatgaaagtactgttatgtctttctcccccctttgaactatgtattcatctcttgaaactgttcactattgccacaagtaattataaattaaactaataatgccacattagacactatatcccataccctaaaccataataatatatatgtaatcaataatcgatgttatttctgtaaataaataaaaatttctgacaatcaactttgtatcagcccactctctgtccctgtcttgttgtctttacaaattgtcttgtaactgctggtaatcaaaatgcagattccaggcaacttgaatctttgctcccaggttataatccttaagcttgacccaagtaaactatctacttatattcatgttctttcagcttttttttttttttttcatgtagacttaccatttagaatgtgctagagtagtctctatgaggggatctctcctttgattgtattccacttgctgtaacaccaaaggatgcagagccaggtggatcctacctggaatctgcagataaggtctggcctctgcctgggatttacaagaaaggaccagaacttggattgagaatgtacagaaaatgaacaaaagtcattttctgcattgtgaatgtaaacatagacatcttacagcccccatttgggagtgtggctctttgagattttcacatcttgttcattgacctgctacagttatgtgaggggctccaggagaaatagactcagatggcagaatctgtaagtgtaaataagcatcttaggagtgagagatcggggccacaaagtatccagagccatgaccacaattatatttagctgtaaaatgtaatactagagtagagtatttttgatctttctcttacccaagagctagcaaatcagaatgggtgatccaggttctggagctccaccagggcagttccattttctattcagagttagcctgagtctctccagcctggcttatcattgggccatgaggcctgggtcactgggaatctctcacaatcacccaggtgtctttgaggcatttgaggatgtccagagcagaattttgtcaggctgacaagagtggttaattctgcttctgtctcagtgtaagagaaatgagtcatcctgtgtttgttcattccctcatacaagagatatctttggttggtaccccgatgacagcttctccagtttcctggtacttggataataaggagaagatctggagacccagatagataaactagctccttccacttcatatgggcattaaaaaaatacatgaagcagtcatagttcctacaatccagaaacttttagtctagactagctactggataagtaattgaagtgtgcatcatatggttggtataataaatagatgtgttaaaaatcttgggctttagaccactttctttatattgttgtgacttctgatgtctacacctgaagggagatttatgaacaaaataattgttataaattcttttttttttttgagatggtgtttcactctgtcacctggtctggcttgcagtggcacgatctcggctcactgtaaactctgccgcccgggttcaggtgactttcccttctcagcctcccgagtagctgggattacagttgcctgccactgcacctagctaatttttgtatttttactagaggcggggtttcatcatctggatcaggctggtctttaactgcttgacctcgttctgcacccgccttggtctcccaaagtcttgagattacaagcatgacccaccgcgcttggccgtatattttctatttcttttaccttgctaactgtagatatttattttctaataaaattaccctagaaaaccttaagggatttgtttaagttgcatactagtatatagtataaagttgtcagggcagtgactagaaaagataaaaactacagaaactctgggatttaagtttcttttaggtaagcttagaaacaaaacaaaactggaagtttcctagttgcatagagaacagaattctacatagggttctcaccctgccccagacgtgttcagattcatcctttttggagaccttagttaggtctgaacctaccctggagtattgcctcacagaactcattaaaggagatcagagttttggctgctgaatcctgctgcctttctagagctggtgctcacaatttcctgaaattcaaaagcagataaatcgggaaaaaaagtatgttttgtaaggtgtttgtttttaaattttttattaaaaccagtgcttgcagagacattgtatttagcaacttgttttctattcctgcagatccagtagttgctgcacaagtcaaaaaagtaaatataaacagaatgaaattttctctagactacattaaactcttctgtatctctttcatctgtctatatttagcttttattctatacaattttttaaaaaatttgatgacagagaaacagaagaaaaaataaaaatgggccctttatctaaatcctgaaaattaagaaacacttagtaccagctccccgggtgttaagagaattaaatcatataatgtgttatgcccagcaccgtgctctgtatcatactctagcacatagtgcctgcttaataaacattgcattagtacctgtgtacatgttctttttaaaatacagacttattcagatattgctgtcttctgtttcctctgtaaattttaaagagccagcaaaaaatataaaacttttaaatggaatgggctgtccttatttttactagaagtatttggttatggcaagagtgttaagtgtaagggaccctgtgctgttcctgctttctctaactaatgctcataatgagccagtggggagcaacatcagcattgacaggggacttgtttaaaacactcattcataaaccctcttcaaacatacagaatcacattacagaatgtgcggccacaattatcaagtgatttataagctcgttaaagcttgagaggcaatgcttagcttagtggttatcagcccaggcttctcattaggatcacatgaccaatttgctgaaatctcttgtaccctccccacagcttctgtttattgttgtgggtggaagcatccatgtttttttaatgaagtgcctcatgtgactctaaggtgattccagaatcaagtataagggctttaaaatatattcatgagagttaaattccacctgtgaactagagggtggtcacagggcctattctatttgggtttggtagggacaggtaagtgtggtgcatatttccattactgtagcaaaagttgctggtgtctatggcaggggagggcacctgaggacaggaaaggagaaacttatatttttatcttcatggagcagttcattgttcccgaatctcttctgttttaaaggacagaaatgggtggctttttctgtctttttctgccagaagatgtcatgctagcaggtaaacatgtggtacacctttaaaggcatattctccagatgcaggtgtaatttgtacagagaatctcatctgagaagaaactccagggaaggaggagaaagaaaaaaaaatggcttttcttcaggtaaacatgtgtcagatgaagagctgtgtccactctgcctcctggactgccatgcgtttagtactcacaaacctttacttctctacttttgtttttcctccgtgagtttgatttaactacttcttaaaattcctatgatggtcaaggatctttgaaaaatatttcttttttatatcccacagacttctctacattctgtttgtcatagcttcttatatgccatgcagaattatcagcaagaatttatgatccacattattaaaaatattccctttgtggctgttgaacacagaaagatgtgggtactcaagattcctattggggaaaactgtggtccttagtaaagatggtaaagtaaaagcctccactcgtgttccattagctatatgcagaagataattcagaaaatgcttatttaaatgggatagaatttattacccagaatgttctgaaaaaaattattaggagatacttgctctctagggtgctaaatgaagcctatttaaaattactactaaaaattacagaacataggagttaactgtattttggagtttgcataaaactgatgtttctttatggttaaattcagattataatttacgttatttgggaggaatatttcaacagtgatactgtgttctgtgtgcattaacacatcagaaaaatttgtcctagtgcagttaatggttaatgattcacttggtgaagtagctctctctcacagattttttcactatagttaattatttttctcttcattattaagcatccttatccagcggatttgcataaaccatcacatttaatctgtcagttgtccttttttctttttttttctatatagttttctatggaagatgaaggctgttatctttgtttacaggccacaaaaacttggaaaaacacaggctcttccacttactggatgtttgacaaaatatccttctcgggccaaaaacattgacatttttggtgagcttgttagaaattcaaaaaatcagacttcattccagatcttctgggaaaaaacccccgcataacaaggtcttcagcttattgtacatattaaaatttgagaggtgacttctaactcaacatgtcttttccatatgaaacatattcacatctcattctgtatgatgtaaatatagcactcaaaaatgtacatgttcatgttcatgcccttaattttatactttattatctagaaaaatatcatatatgaactgatgttgtggatctaatgctgccctttttttctcagataatacattagagaatatttctgtgttgaagattattttattggataattttagtcagtcctataagtcagaaccacttctctttactctctcatttcaccttaagtaaaattaaaaattccacccatggccacttggtgaaaatgtgtgtgtgtgtttttcagggaccattgcaatttagagatgtggccatagaattctctctggaggagtggcattgcctggacactgcacagcggaatctatataggaatgtgatgttagagaactacagtaacctggtcttccttggtgaggataactttaatacataattcataatacaccctaaaggttttatttctcttttttgtagaatgttttttagtaatttattctttgcataaaggagtttcagatccattttttccagaaaatcttcagaatttgttcatttagaaaagaatttcttcagtgcctcttgcctgtatagttctgactttgggaggctagggcggaggagattgcctgaggcgaggagttcgagaccagcctggccaacatggtcaaaccccatctctactaaaaatacaaaaaattagccaggcgttgtggcatgcggctgtaatcccagctacttgggagggtgaggcaggagaattgcttgaacccaggacacggaggttgcaatgagccgagatcgtgccgttgcactccagcctggatgacagagcaagattacttctcgagaaaaaaacaaaaatttcttcaagatgtttcatcttaatccaatctttccacattcctgagttgagctgtattcttcactctaaattagtggtaattacagaaatttactgacgtaaaatattgtagcccccacctgaaaatctaaatgccaccaccaatttttgattcagtggtaccaggtagtaaaattaagaaacctacaaattggaagtattttctttttcctttttttttttttttgagacggagtcttgctctgtcacccaggctggagtgcagtggaatgatcttggcttactgcaacctccgactcccaggttcaagcaattctcctgactcaatctcccgagtagctgggactacaggcatgcattaccatgctctgctaatgtttgtatttttagtagagatggggtttcaccatgttggccagtctggtctccaactcctgacttcgtgatccgcccgccttggcctccccctgatctcatgatccacctgctttggcctcccaaattgctgggatcacaggcgtgagccactgcacccggcaaattgaaagtattgtttaaatatctataaatttctgttataaatttgtattttggtattaatttactagaatattttatcacatcgtctttgctgagcacattactagcttgtaattggagaatatgagcaagattcatgttatttattcttaacaaaacaggtattgttgtctctaagccagacctgatcgcccatctggagcaaggaaaaaaacctttgactatgaagagacatgagatggtagccaacccctcaggtaggtgtgagtgaaaatgaatacaacagacaacacagtaagaggtcccaaggccaaagagaaagccagtccttaaaatgtgattcgggaagctgtgttccaaaggaaatagttcctgggcagctgttttttgtttttgtttctgttttttaattttgttctcacaaagggacatcttccgttttatgcttttaaattctctaaggattctacttttgttttggtgagcttccttcaagttctcagtgagagccacagtcctcttgatggcatataagagattatacaatctggctgcttttccattcttttggggacacaaaaatatttgcatgattttgaaaaactaaaactactttttagttctatttttgcatcaggtctaaaatgtgtgagagtagtttctgttgcatttttttgttcatttttctttatagtccattctatttttattactacatagtttttaagtatagtttgcaattatacatatgatatgcttctgctttgttctttttcctcaagattgctttggctattcacacttttattgtagtttcatgtaaattttagaattgtattttccattactgtgaaaaaaataccactgcaattttgataggaagtttattgaatctgtagattactttggataatatgacactttaataatacttattcttcaagttatagacataaaatattttaaaatttatttggatcttctaatttttttattgtaaagattttttatctcttagttaatttttttcccagtagttttttttaatgctacattaaataagatttttcttcctctattttgtcaaatagtttcttttaagtgcatgaaaccattcatatacttgtgtgttaattttctgttttggtaatttactatttactgagtgtatttattagtttagacagctttttaaattttttttattttttgacagtttcgctcttgttgcccaggttggagtgcagtggcacgatctcagctcaccaccaccacacctggctaattttgtatttttagtagagatggggtttcaccatgttggtcagagtggtctcaaactcccaacctcaggtgatccacccgccttggcctttcaatgtgctgggattacaggcatgagccaccacgcctagctagacagtttttaatatactgtttatggtttttaaaatatgagattgtatgatctacaaacagcaactttttacttatttttcttcaatttcagtgactttctttccttccttccttccttccttctttctttttttttcttttttttaattatactttaagtcctagtgtagatgtgcacatcgtgcaggtttgttacacatgtatacatgtgccatgttggtgtgctgcacccattaagtcgtcatttacattaggtgtatctcctaatgctatccctcccccgtccccccaccccacaacaggccccagtgtgtgatgttctccttcctgtgtccaagtgttctcattgttcaattcccacctatgaatgagaacatgcggtgtttggttttttgtccttgcgatagtttgctgagaatgatggtttccagcttcatccatgtccctgcaaaggacatgaactcatcatttttttatggttgcatagtattccatggtgtatatgtgccacattttcttaatccagtctatcattgttgtacatttgggttggttccaagtctctgctattgtgaatagtgctgcaataaacatacgtgtgcatgtgtctttatagcagcatgatttataatcctttgggtatatacccaacaatgggatggctgggtccaatggtatttctagttctagatccctgaggaatcgccacactgacttccacaatggttgaactagtttacagtcccaccaacagtgtaaaagtgttcctatttctccacatcctctccagcacctgttgtttcctgactttttaatgatcgccattctaactggagtgagatggtatctcattgtggttttgatttgcatttctctgatggccagtgatgatgagcattttttcatgtgtcttttggctgtataaatgtcttcttttgagaagtgtctattaatatccttcgcccacttttcgatggggttgtttgtttttttcttgtaaatttgtttgagttctttgtagattctggatattagccctttgtcagatgagtagattgcaaaaattttctcccattctgtaggttgcctgttcactctgatggtagttttttttttgctgtgcagaagctctttagtttaattagatcccatttgtcaattttggcttttgttgccattgcttttgttgttttagacgtgaagtccttgcctgcctatgtcctgaatggtattgcctaggttttcttctagggtttttatggttttaggtctaacatttaagtctttaatccatcttgaattaatttttgtataaggtgtaaggaagggatccagttccagctttctacatgtggctagccagttttcccaacaccatttgttaaatagggaatcctttccccatttcttgtttttgtcaggtttgtcaaagatcagatagttgtagatgtgtggcattatttctgagggctctgttctgttccattggtctatatctctgttttggtaccagtaccatgctgttttggttactgtagccttgtagtatagtttgaagtcaggtagcatgatgcctccagctttgttcttttggcttaggattgacttggtaatgtgggctcttttttggttccatatgaactttaaagtagttttttccaattctgtgaagaaagtcattggtagcttgatggggatggcattgaatctataaattaccttgggcagtatggccattttcatgatattgattcttcctacccatgagcatggaatgttcttccatgtgtttgtatcctcttttattttgttgagcagtggtttgtagttctccttgaaaagatccttcacatcccttttaagttggattcctaggtattttattctctttgaagcaattgtgaatgggagttcactcatgatttggctctgtgtttgtctgttattggtgtataagaatgcttgtgattttttcacattgattttgtatcctgagactttgctgaagttgcttatcagcttgagattttgggctgagacgatggggttttctagatatacaatcatgtcatctgcaaacagtgacaatttgacttcctcttttcctaattgaataccctttatttccttctcctgcctgattgccctggctggaacttccaacactatgttgagtaggattggtaagagagggcatccctgtcttgtgccagttttcaaagggaatgcttccagtttttgcccattcagtatgatattggctgtgggtttgtcataaatagctcttattattttgagatacatcccatcaatacctaatttattgagagtttttagcatgaagggctgttgaattttgtcaaaggccttttctgcagctattgagataatcatgtggtttttgttgttggttctgtttatatgctggattatgtttattgatttgtgtatgttgaaccagcctggcatcccagggatgaagcccacttgatcatggtggataagctttttgatgtgttgctggattcggtttgccagcttattgaggatttttgcatcgatgttcatcagggatgttggtctaaaattctctttttttgttgtgtctctgccaggctttggtatcaggatgatgctggcctcataaaatgagttagggaggattccctctttttctattgattgggatagttccagaaggaatggtaccggctcctccttgtacctctggtagaattcagctgtgaatccatctggtcctggactttttttggttggcaagctattattgcctcaatttcagagcctgttattggtctattcagagattcaagttcttcctggtttagtcttgggagggtgtatgtgttgaggaatttatccatttcttctagattttctagtttatttgcgtagaggtgtttatggtattctctgatggtagtttgtatttctgtgggatgggtggtgatatcccctttatcattttttattgcatctatttgattcttctctcttttcttcattagtcttgctagcggtctatcaatttggttgatctttgcaaaaaactagctcctggattcattgattttttgaagagttttttgtgtctctatctccttcagttctgctctgatcttagttatttcttgccttctgctagcttttgaatgtgtttgctcttgcttctctagttcttttaattgtgatgttagggtgtcaattttagatctttcctgctttctcttgtgggcatttagtgctataaatttccctctacacactgctttaaatgtgtcccagagattctggtatgttttgtctttgttctcattggtttcaaagaacatgtttatttctgccttcatttccttatgtacccagtagtcattctggagcaggttgttcagtttccatgtagttgagcggttttgagtgagtttcttaatcctgagttctagtttgattgcactgtggtctgagaggcagtttgttataatttctgttcttttacatttgctgaggagtgctttacttccaactatgtggtcaattttggaataagtgcagtgtggtgctgagaagaatgtatattctgttgatttggggtggagagttctgtggatgtctgttaggtctgcttggtgcagagctgagttcaattcctggatatccttgttaactttttgtctcattgatctgtctaatgttgataatggggtgttaaagtctcccattattactgtgtgggagtcttaagtctctttgtaggtctctaaggacttgctttatgaatctgggtgctcctgtattgggtgcatatatatttaggatagttagctcttcttgttgaattgatccctttaccattatgtaatggccttctttgtctcttttgatctttgttggtttaaagtctgttttatcagagactaggattgcaacccctgcctttttttgttttccatttgcttggtagatcttcctccatccctttattttgagcctatgtgtgtctctgcatgtgagatgggtttcctgaatatagcacactgatgggtcttgactctttatccaatttgccagtctttgtcttttaattggagcatttagcccattgacatttaaggttaatattgttatatgtgagtttgatcctgtcattatgatgttagctagttattttgctcattcgttgatgcagtttcttcttagcctcgatggtctttactatttggcatgtttttgcagtggctggtaccagttgttcctttccatgtttagtgcttccttcaggagctcttgtagagcaggcctggtggtgacaaaatctctcagcatttgcttgtctgtaaaggattttatttctccttcactgatgaagcttagtttggctgggtatgaaattctgggttaaaaattcttttctttaagaatgttgaatattggcccccactctcttctggcttgtagagtttctgccgagaggtcagctgttagtctgatgggcttccctttgtgggtaacctgacctttctctctggctgcccttttttccttcatttcaactttggtgaatctgacaattatgtgtcttggagttgctcttcttgaggagtatctttgtggcattctctgtatttcctgaatttgaatgttgggctgccttgctagattggggaagttctcctggataatatcctgcagagtgttttccagcttggttccattctccccatcactttcaggtacactaatcagatgtagatttggtcttttcacatagtctcatatttcttggaggctttgttcatttctttttattcttttttctctaaacttcccttctcgcttcatttcattcatttgatcatccatcactgacaccctttcttccagttgatcaaatcagctactgatgcttatgcatttgtcacatagttctcgtgccatggttttcagctccatcaggtcctttaaggacttctctgcattggttcctttagttagccattcgtctaatcttttttcaaggtttttaacttctttgccatgggtttgaacttcctcctttagcttggagaagtttgatcgtctgaagccttctcttaactcatcaaagtcattctccattcagctttgttccattgctggtgaggagctgtgttcctttggagggggagaggcactctgatttttataattttcagtttttctgctctgtttttccccatctttgtggttttatctacctttggtctttgatgatggtgacatacagatggggttttggtgtggatgtcctttctgtttgttagttttccttctaacagtcaggaccctcagctgcaggtccgttggagtttgctggaggtccactccagaccctgtttgcctgggtatcagcagcggaggctgcagaacagcgaatattggtgaacagcaaatgttgctgctccagagatcattcctctggaagtttcatctcagaggggtacccggccgtgtgaggtgtcaatctgctcctacttgggggtgccttccagttaggctactcaggggtcagggacccacttgaataggcagtctgtctgttctcagatctcaagctccatgctgggagaaccactactgtcttccaagctgtcagaggtttctcctgcaattttgtttggctatgccctgcccccagaggtggagtctacagaggcaggcaggcctccttgagctgtggtgggctccacgcagttcgagcttcctggatgctttgtttacctactcaagcctcagcaatggcaggcgcccctcccccagcctcgctggtgccttaaagtttgatctcagactgctgtgctagcaatgagcgaggctccatgggtgtaggaccctctgagccaggcatgggatataatctcctggtttgccatttgctaagactgtcagaaaagtgcagtattagggtgggagtgacccaattttccaggtgctgtctgtcacccctttccttggctaggaaagagaattccctgatcccttgcacttcccaggtgaggtgatgcctcgccctgcttcggctcacacttggtgtgctgcacccattgtcctgcaccccttgtccgacaattcccagtgagatgaacccggtacctcagttggagatgcagaaatcatccgtcttctgtgttgctcacactgggagctgtagactgcagctgttcctatttggccatcttggaactgtccccttccttccttccttccttctttcttctttcttttgttttttggtgggatttcagtcttgttgcccaggctggagtgcaatggcatgatttcggctcactgcaacctttgcttcctgggttcaagcaattgtcctgcctcagcctccagagtagcttggattacaggtgtttgccacaatgcctggctaattttttgtaattttttagtagagatgaggtttcaccatgttggtaaggctggtcggaaactcctgaccttagatgatccgcccgtctctgcctcccaaagtgctgggattacagccgtgagccaccgcacccagccggattttttttagttctgtgaataattttctgtcacatacttctagtgctacattcaaatagatgtattgccaatggacacaatatagttttgtattggtgtctgaatatgatggagcaaacacctcttcaagttttcataaaccgatttttgaagcatttcctcaggtaactgtgtgggtttctttttttctttctttttttttttctctttttttgaggtggggtttcattcctgttgcccaggctgaagtgcaatggtgcaatctaggctcactgcaacctccacctcctgggttcaagagattctcctgcctcagcctcccaagtagctggaattacaggcatgtgccaccacacccgggtgattttgtatttttagtagagagggggtttctccatattggtcaggctggtctcccaactcctgacctcaggtgatccacctgcctcagcctcccaaagtgctggaattacaggcatgaggcaccccgcctggcccaactgtgtggatttctatgtagacagaactgaccataaactgtggttcaggcaactgaaattgaatcattgatttgcttcagggaacgcagtaaaagcgaaggtctgtaggcctgcctacatggctgtacatggatgcctttattcaggtctctggaatggcatgacctctcccagactgtggctgggatgagtttgggatggttacagagtaagttcagaattctcagtgagaccaagttggctgaactctatcctgggctgtagccaagaacaggggtcctgtagtttcccacctgaatgaaggcctcccttctgaatagaacacgtccaatcttcagctttaacagcatttcacaactccctccccggatctcaaatttctgttagaggcacttattttggagatgtcatcttgctacataatccaggctggtctcaaaatcctgacctgaagcagttctcaaaccttaatgtaccgtggagctgtcattacagttgtgaaccataatgcctggttttctcataaaggcatgtttgtcaaggatggttgagatcttttttgctgtaaggggatatgaaaatagggcacttttaatcttttcatcttactgatgtcactctccctgtagatttttactttctattttctacttcaaatttgtctgtaatttgagattcagatatttaggacaatatgctagaatttgcatggtatgcctcaagtaaattagataattagtaggcactccatatttacgaaaatagttacttgtaaatttcagtttgctgcaggcaaaaaggaattaaaggattttcatctacttactttaacctatatctaaataataatatactttattttctaatatttgttttacatatcagagggtctaaccctattctgcaaaatatgtattttctttatttaaaaatgtaagactactctttgcttctaaaattggattacagcagtttcattttgtgtaagaatagcatatatttaaaacaaaagtaactctaggttcttttaaatgctaatttattaagtttcttattagaatcttctatttataattatacggcatattctctgaaattttactgccatacagtgcataccaatgattcaaaatacctgcacttcatgagtacaaactaaaagctaaatattgcagttacctagaattttttttttttttttttttagatggagtcaatctctgtcatccaggctagcgtgcagtggtgcggtcttggctcactgcaacctccacctccaggttcaagccattctcgtgcctcagtctcccaagtagatgggattacaggcatgtgtccccacacccagctaaattttgtattattagtagagacggggcttcactacattggccaggcaggtcttgaactcctgacctcaggtgatccactcgccttggcctcccaaaatgctgagataacagacatgagccactgcacccagcctgacaattattttttttgtgatacatcaatgttgcatactagattttatgaggaaacatttctattattgtttcaaagttccatattagtgtgttttctcagtgtagggttttttttttttccgagacagagtctcactctgtcgcacaggctggagcgcagtggcgtgatcttgcctcactgcaacctctgcctccggggttcaagggattgtggttcgtgcctcagcctcccaaagtgctaagattacaggtgtgagccactgcacccagcctcattgtaggtttcttaacattagtttcttgtgttttttgattttacttaagtattataattttagacaatttgtaattctgttggtacactttaagtcaatttgaggtttaattaagaaataaattatgcatgtctatcaatcagattatatatgtatatgtgtatatctataaatatgactccaattttagttatggcttatattctttcttagctgattttcgatggtagttttatcttgtctaagtgagagtcatggagatagtcttattttcaccatgtgtttaatgattaatgtatatttctttttgtgaaagaaacacttttgtgatttgaaggtaattttcaaaaagatttataattctgtatttttttcagtttttctttaaaaacattgttttaaaaacacataacataaaatttaccatcttaaatttattgaagtttatatttcagggccaggtgtggttgtggtgctcatgtgtaatcccaggattttgggaggtcaagccaagaggatccctggagcccaaaagtttgagaacagcctgggcaacatatggagacccctctctatgaaaaaaatttaataatagccaggcatggtggtgtgcagctgtggtcccagctacttgggagattgaagggagtcaaaattgtgccactacactccagcttgggtgacagagtgagaccctatctcaaaaaaagctgttcatttcaggcatgttaagtatattcacattgttatgcaaaagacttctagaaacttaacatcttgtaaaacttaaattcaatgtccattaagtaacaactgctcattttaccctctctccataccttgagagacaagccttctactttctgtttttatgattttgactacttaagatatctcataagtggaatcatacagtatccataattttgttactggattaattcaggtgacataatattcacaaggttcatctaaaaaggtgacaagattattctctttaaggtggaataatattccattgtatgtatatgttacattttttaatatgtttataagtcaagagacatctagggtgcttcagcctattggcttttgtgaatactgattacaataaacatggatttgctttgctgcccaggctaaagtgcagtggtgcaatctcagctctctgcaacctctgccttctggttcaagcaattcttgtacctcagcctcccaagtagctgggattacatgtgcatgccacatcgccaagctaatttttatatttttagtagagatggtgttttaccatgttggccaggctagtctcgaacttctgacctcaggtatctgccaacctcaccctccccagttgctaggattacaggcttgagacactgcacctggcctgtgttaacatgttttggatatagatttatgaatacttttttccatttatgtatttttatgtctaagtagtttatttaaaatatgtttttgtatcattcaagaaaataagccaactttatcagtgttgataatcagttcttgaagagattatttttctctattttgtaaacatggcaactttgtggaaaatcatttgatcatatacaaaatggttcatttctgagctctctattctgttctttcatctgtttatgtttgtgtcagtatcatattgtttatgttactgtagcttttaactgtaggttgtattgatatctttgaaaaatgaaatttttgacccctgagcaagaatatattgaagagtgtgtttcatattcacatatttttgaatttgccagtttgacttttgctttttaatttctagttttattcaggttttattagaaaacaacccagtgcataattttagtgtttttaaattgatttgttgttgttttgagacaagatcttactgtcacccaggctgcagtgcagtggcagaattttagcttattgtagcctcaacctcctgggctcaagtgattgttctttcacctcagttttttgagtaggtaggactgtagacatgcactaccatgtaaggctaattgtttgcttttttgtagtgttaggatctcactatgttgcccaggctggtctcaaacttttgacaccaatggatctcccaaagtgttaggattataggcaagagccatggcacccaatcagtatttttaaatttaataaaacttgttatgtgtcctaacagaatataccaggtgcaaataagaatattgtgtattatcttggttttgactggagagttttgtgtgtgtctgtgaagcctagttggtctataatatggtttggatgtctatgttgtccaaatctcatgctgcaatataaatcctcaatgttggctatgggacctggtgggacacgtttgggtcattgggggcaaatttctcatgaatggcttggtacatcctctcggtaaccaaaaagtttacactgtatcaattcaaataagagctggttcattaaaagaacgtggcttcttcacctcatacttgctctgtctcttaccatataatatgtccagttactctttaccttccaccttcattttaagctttctgaaatcctcaccagaagcagatgctggcacacacttcttatacactctgccaagctgtgagccaaataaacaatttttctttataaattatgcactctcaagtatttctctatatgcaaaagaatcaatatagtctataatgttgtctaagttttttggttgttattttttacctgaattttctattattgcaaactgggtcttgatgtctacaatcattatgttgctatgtatatctcgcttcacttttatcaatatttgctttatatattttggagctctgatgttatgtacacatatacatatagatagataaatattttagttatacattcctgctaaatcaactcactttaccatcatataacgtaggcaccagccccacaggattagtgggtttttctccctgtgtgcagagataagagattgtagggccgggcgtggtggctcacgcctgtaatcccagcactttgggaggccgaggcgggcggatcacgaggtcaggagatcgagaccatcccggctaaaacggtgaaaccccgtctctactaaaaatacaaaaaattagccgggcgtagtggcgggcgcctgtagtcccagctacttgggaggctgaggcaggagaatggcgtgaacccgggaggcggagcttgcagtgagccgagatcgcgccactgcactccagcctgggcaacagagcgagactccgtctcaaaaaaaaaaaaaaaaaaaaaaaaagagattgtagaaataaagacacaagacaaagagataaaagacagctgggcccgggggaccactaccaccaagacgtggagaccgatagtggccccgaatgtctggctgcagtgttatttattgaatacaaagcaaaaggggcagggtaaagagtgtgagtcatctccaatgataggtaaggtcacgtgggtcacgtgtccactggacagggggcccttccctgcctggcagccaaggcagagagagagagggagagagagagacagcttatgccattatttctgcatatcagagacttttagtactttcactaattttgctactcttatctaaaaggcagagccaggtgtacagtatggaacctgaaagcagactaggagcgtgaccactgaagcacagcatcacagggagacggttaggcctccggataactgcaggcaggcctgactgatgtcaggccctccacaagaggtggaggagtagagtcttctctaaactcccccagggaaagggagactccctttcctggtccgctaagtagcaggtgtttttccttgacactgaggctactgctagaccgcggtctgctaggcaacgggcgtcttcccagacgctggcattactgctagaccaaggagccctctggtggccttgtctgggcataacagaaggctctcactcttgtcttctggtaacttctcactatgtcccctcagctcctatctctgtatggcctggcttttcctaggttgtgattatagatcgaggattattataatattggaataaaaagtaattgctaccaactaatgattaatgatattcatatataatcatatctaagatctatatctggtataactattcttatcttatattttattatgctggaacagctcatgtccttggtctcctgcctcggcacctaggtggcttgctgcccacaatataatatcaatttttgtcttgtagaagtacttgatttaaagcatattatgtctaatataattatgaccaccttactcaattgtggttgctattttcatggaatatacatttttttcattctgttactttctgcctatttgacttaatgctaaagtaagtcccttgtaggcagcacactgtatgcttttttaaaaaaaccacttaggcattctatatctttttctttatataattttatttatatatatatttatatttgtatttatttatttatttattttatttggtttgtttttgagatggagtttcactcttgttgcccaggctggagtgcaatggcatgatctcagctcactgcaaccttcacctcccagtttcaagtgattctcctgcctcagccccctgagtagctgggattacaggtgcatgccaccatgcccagctaattttttgtaagtttagtagagacgggatttcactatgatggccaggcttgtcttgaactcctgaattcaggtgatctgcctgcctcagcctcccaaagtgttgggattactagcatgagccactgcacccagcctcatttatttttgagatagtgtctcactctgtcaaccagcttatttgtattttttgtagagacagaggtttgccatgttgcccaggctgatcttgaacttttgggttcaagtgatcagcccatcttgaacttccaaattcctatgattacatttcattttatttagtagtttaatctatatttaaaatgattggttaaagaaatgaagttgttattaccactaatattgttattgttttatgtgtttctagtagttatatttttctcatttcctgttttacttacttaattttcatttaattttgtactggcatgctttgattatattttattttcttttgcatactttgtataaataatatcttagtaatcatctcaaaaactggagattacatacatcttaaagttaaaacaatatattttaatctcataacaacttcaattgaataaaaactatgcctctatattttccagtttgttattgatataaaaattattttatatggtgtatctacaggtgcacgcctgttatcccagcactttgggaggccaaggtgggtggatcccgaggtcaggagatcgagaccatctggccaacatggtgaaatcccatctctactaaaatacaaaaaattagccaggcatggtggcccatgcctgtagtacgagctactcaggaggttgaggcaggggaatcactagaacccaggaggcactccagcctgggagacagagtgagactccatctcaaaatatatatatatttccaaatattcagtttggtcttattatattgacattgttatgcaacatatcactagagtgttttttatcttgcaaagctaaatctcagtacacagtaaataactaccaatcctttgtattttgtggttcttttcaaacaccactctgttttctgtttctaagagtataactgctttatatatctcatccaatctctgtctttttgcggctgggtcactttattttgcataatgtcatcaatatttatcttaatagttgttacagtattttctgctttttgaaaactgagtgataattcctgtacttttgtgtctactgaatgatttggtgacacaaatttcgattacttttacctagtggcttgcagtaacaatgctacaataattatgtgaaagttaatgtaatatatttgctgcattctgttttattagtctactttttcacctttatactcataccaaattattttaattctgtagctttttgatgtgttttgaaatcagaaatggtattgcctgtaacattgttcctgtttttgaagattgctgggtactttattgtctgtttggattccatatacttttaaatttgttgtttttatttctttgaaaatgctgtgagtcatttgaaagacattgcattaaatctgtagattaaattgagcagtaaagacatcttcaaaatattgtttttcaattgtttgtttttgagatggagttaaatttacctgccttaccagttacatttgtgccattttggtttgtatgtttttgttacatttatatgttcaggaagacattacagcttgtggtattttactatgtcatcttagttatgtagtttgtataattttataggttagatttgtaaagtatatttatctgagtctagcaattgaagtaatgtgtttttattgtttctttcagttatatgttctcattttgcccaagatctttggccagagcagaacataaaagattctttccaaaaagtgatactgagaagatatgaaaaacgtggacatggaaatttacagttaataaaaaggtgtgaaagtgtagatgagtgtaaggtgcacacaggaggttataatggacttaaccagtgtagtacaactacccagagcaaagtatttcaatgtgataaatatgggaaagtctttcataaattttcaaattcaaatagacataatataagacatactgaaaaaaaacctttcaaatgcatagaatgtggcaaagcttttaaccagttctcaacccttataacacataagaaaattcatactggagagaaaccctacatttgtgaagaatgtggcaaagcctttaagtactcctctgcccttaatacacataagagaattcatactggagagaaaccatacaagtgtgataaatgtgacaaagcctttattgcatcctcaacccttagtaaacatgagatcattcatactggaaagaaaccctacaagtgtgaagaatgtggcaaagcttttaaccaatcctcgacacttactaaacataagaaaattcatactggagagaaaccctacaaatgtgaagaatgtggcaaagcttttaaccaatcctcaacacttactaaacataagaaaattcatactggagagaagccctacgtttgtgaagaatgtggcaaagcctttaagtactcccgtatccttactacacataagagaattcatactggagagaaaccatacaagtgtaataaatgtggcaaagcctttattgcatcctcaacccttagtagacatgagttcattcatatgggaaagaaacattacaaatgtgaagaatgtggcaaagccttcatttggtcctcagtcctaactagacataagagagttcatactggagagaagccctacaaatgtgaagaatgtggcaaagcctttaagtactcctctacccttagttcacataagagaagtcatactggagagaaaccctacaaatgtgaagaatgtggcaaagcctttgttgcatcctcaacccttagtaaacatgagatcattcatactggaaagaaaccctacaagtgtgaagaatgtggcaaagcttttaaccagtcctcatcccttactaaacataagaaaattcatactggagagaaaccctacaaatgtgaagaatgtggcaaagcttttaaccagtcctcttcccttactaaacataagaaaattcatactggagagaaaccctacaaatgtgaagaatgtggcaaagcttttaaccagtcctcaacccttattaaacataagaaaattcatactagagagaaaccctacaaatgtgaagaatgtggcaaagcttttcacctatccacacaccttactacacataagatacttcatactggagagaaaccttatagatgtagagaatgtggcaaagcttttaaccattctgcaaccctttcttcacataagaaaatccattctggagagaaaccatacgagtgtgataaatgtggcaaagcctttatttcaccctcaagccttagtagacatgagataattcatactggggagaaaccctagaagtgtgaagaatgtggcaaagccttcaagtggtcctcacaccttactatacactgagagttctgaacttactctgtaaccatcccaaactcctcccaggcacagtctggcagaggtcctgccatttcggagacctggaggaagtggcccatttacagccatgtaggcaggcctgcagaccttggcctttactacggtacctgaagtggttcaatgactcagtttcagttacctgagccacagcttaaggtcagttctgcctatatagaaacccacacagttaacctgaggaaatgctctctggtactcactgaaagccacactcatccacatcctgatacaaggcccaccatatgcagacctgactgccaaaacatgccctagtgtctgccgtacagagtgaagtcctgaaggatatttagtctgtccaaaactaaaatgaagatttcaactccccaaccccctctaacaagccagctaaaggtggactatagtgcagacccagcaaccttgtgaccaggctaaaacccctcatcactacaaattcagagggcatctcatcaccctaagggcccaacgaaagatctttaccttctaacatcagtttatgaaaacttgaaaaggtgtttgctccatcaaattcagacaccagtacaaaactatattatgcccattgtctggttctattttaatgtagcactggaagtgtgtggcagaagaattagtcaaagaaataaaaatagccattgaaattgaagaaaaatgttgctgtttgtagatcatacaatcttatatttgaaaaaccttaaacagtacattaaaacccgtctaaactaataaatacactcagtaaattaacaaaatataaaatcaacatacatgtatatgtatggttttatacacttaaactatctaattaaacagaggaacacactgggcactttggctcacgcctgtaatcccagcactttgggaggccaaggcgggtgaatgatctgaggtcaggagttacagatcagcctggccaacatgttgaaatcccatctctactaaaaatacaaaaattagctgggaatggtggctagcacctgcagtccaagctagtttggaggctgagggaggagaattgcttgaatttgggaggtggaggttgtggtgagcagagatcgtgccattgcactccagcctgggcaacagtgccagactccatctgaaaaagaaaaaaaaaagaaaatcgtatttactatagcattaaataataaatgtctggccaggcctggtggctcatgcctgtaatgtcaaggtgggcggatcacaaggtcaggtgatcgagaccatcttggccgtggtgaaaccccatctcaactaaaatataaaaaattagctgggcatggtggtgcatgtctgtagtttcagctaattaggactgaggcaggagaatcgctagaacccagggaggtggaggtttcagtgaactgagatcatgccactgcactccagcctggagaaagagcaagacactttctcaaaaaataaatacataaatctctgagaaaataaccaaaaaggtaagaaatctttacaataaaaatatcaataaaaaattagagaaaatccaaataaatataaaacattttatctctgggttgaaagtaaatatcattaaagtgccgtattatccaaagttatctacagattcaataaacttcctatcaaaacttgcagtggtatttctttcacaataatggaaaatactattttaaaatttatgtgaaactaaaaatttgaatagccaaagcaatcttgaggaaaaaaaaagcagaaggatatcatacttataatgtcaagctgtatttcaagactgtattctaataaaaaccaaatggattgtgcaaaaaaatgagcaaaaatgcaacagaaactaacacatatttcagacatgatgaaaaaaacttaatagtttatcaaaatcatgcagatatttgtgtgtccccaaaacaatagaaaagcagccagattgtgcagtctcttatataccatgaagaggactttggctctcactgtgaacttgaaggaagttcactgaaagaaaagtagaatccttagagaatttaaaagcataagacagaagatgcccctttgtgagagcaaaatttagaaacaaaaaaaacagctgctcaggaaatatttcctttggaatacaacttccaaattagattttaagaactggttttctctttgactttgagacttcttacctgtgttttccgttgtattcattttcactcatacctacctggggggttggcaatcatctcatgtctcttcagagccaaaggtttttttccctgctccagatgagtgatcaggtctggcttagagacaacaatactgttgtattaagaataaataacatgaatcgtgctcatattctccaattacaagctagtaatgtgttcagtagagaggatgtgataaaatattctagtaaattaattacaaaatactaatctataacaaatttctaaatatttagaaaatgctttcaatttgtaggtttcttaattttactatctaatactactgaatcaaaaattggtggcaattagattttcaggtgggggcaagaatactttgtcactaaatttttggaattaccactaatttagagtgaattatacagctcaaatcaggaatgtggaaagtttggattaagatgaaacatcttgaagagacttttctgcatgagcaaattttgaagattttctgaaaaaaggggatctgaaactcttttatgcaaagaatagattactaaaaagttctacataaaagagaaataaaacctttagggtatattatgaattatgtcttaaagttatcctcaacaagaaagaccatatttccatagttctctaacatcacattcgtatacaacttccgctgtacagtgtccaggcaatgccactcctccagagataattctatggccacatctctaaattgcaatggtccctgaagaacacacacatttttaccaagtggccaggtgtggaatttttaatttgacttaaggtgaaatgagagagtaaagagaagtggttctgacttatagcactgactaaaattatccaataaaataattttcaaaacagaaatattattctctaactatgataaaaaaaaaaaagcaccataagatccagaacaacagttcatatattttatttttctagataataaagtataaaattaagggcatgaacacgaacatgtacatttttgagtgctatatttacatcatacggaatgagttgtgaatatttttcagatggaaaagacattcacttaggcatttctcaaatttattatgtacaataagctgaagaccttatgcaggtttttttttttttccaagaagatctggagtaagtctgatttacgtatttatttccttttcttttttatttgagacggagtttcatgcttgttgcccaggcttctgtgcagtggcatcatcttggctcacggcagtgtccccctcctgggttcaagcaattctcctgcctcagcctcctgagtagttgagattacaggcatgtgcctccacgcccagctatttttgtatttttagtagagacagggtattctccatgttggtcaggctggtctcaaactcccaacctcaggtgatctgcctgccttggcctcccaaaatgctgtgattacaggcatgagccagggctccccgctgattttttgaatttctaacaagcttaccagtaatgctaacgtttttggcctaataaggatattttgtcaaagatccagtaagtggtagagcctgtgttttcccagtttttctagcctgtaaacaaagataagagccttcattttctaaagaaaaatatgtagaaaaaataaaaggagaactgccagattaaatgtgatcacttgtgtagagcagctgcataaagataattatgaagagaaaaatagttatctctacagtgaaaaaaatcaatcagctatttcaccaagtgaatcattaaccattaactgcactaggacaaatttttatgatgtgctactgcacacagaagaacacagcatcactgttgaaatattcctccccaaaacagtaaactagtctgaatttaaccataaacaacagtttatgcaaacttcaaaatacaggtaactcctatgttctgtaatttttagtaggaattttaattaggcttcatttagcaccctagagagcaagtatctcctaataatttttttcagaactttctgggtaataaatgccattccatttaaatcagcattttcttaatcctcttctgcatagagctaatggaacacacagctggagcctcaacattacatgttctccatctttactaagggccacagttttccccaatagaaaccttgagtatccacatctttccatgttcaacagccacaaagggaacatttttaatattgcaggtcataaattcttgcggagcattctgcatggcatataagaagctatgacgtacagaatgtagagaagtctgtgggacataggacagaaacgttttccagagacccttgactatcataagaattttaagaagtagttaaaccaaactccttagggaggaaaaacacaagtagagaagtaaaggtttgtgagtactaaacgcatggcagtccaggaggcagagtggacacagctcttcatctgacacatgtttacctgaagaaaagccatttttttctttctcctcctcctctggaattccttctcagatgagattctctggacaagttacacctgcatatggagaatatgcctttaaaggtgtcagtaccacatttacctgctagtatgacatcaactggcagaaaaagaaaaattcacttactgctgtcttttaaacagaatagattcaggaataatgagctgctccatgaagacaaaaatataagcttctcctttcctgtcctcaggtgccctcccctgccagagactccagcaatttctgctacagtaatggaaatatgcaccacactgacctgtccctaccaaacccaaacagaacaggccctgtgaccaccctttagtgcaaaggtggaacttaactctcgaaaatgtattttgaagccttcatacttgattctggcctcaccttagagtcacatgaggcccttcattaaaacaacatggatccttccacccagaacaataaacagaagctgtggggagggcacaagtataaatcacttggtaattttggtcccacattatgtaaggtgattctgcaggtttgaaaagggtttatgaaagagtgttttaaacaagtctcctgtcaatgctgatgttgctcccccttggctcattattagcattagagaaagcaggcagagcacagggtcccttacacttaacacccttctcacaaccaaatacttgtcgtgcaaataaggacaacccatctccatcctaaagttttatattctttgctggctctttaagtttatagaggaaacagaaggcagcaatgtttgaataagtctgggtttaaaaaacaacatgtacacatgtactactgcaatgtttattaagcaagtactatgtgctcaagagtatgatacagagcactgtgctgggcataacacattatgtgatttaattctcataataccctgggagctagtactaagggtttaggaattttcaggatttagataaagggcccagcatttttattcttctgtttctctgtcatcaaattttttaaaaagttgtaagaaataaaagctaaatatagacagatagaaaagatatagaaaggatgagtttaatgcagtttagagaaaattttattctgtttatgtttacttttttgttacttggggagcaattactggatctgcaggaatagaaaacaagttgctaaatagaatgtctctgcaagcactggttttaatagaaaacttaaaagctaagactctataatacatactttatttttcccattcatctgcttttgggtttcaggaaattgtgagcaccagctctagaaaggcagcaggattcaccagccaaaactcttgatctctactaatcagttctgagagcaagactccagggtatggtcagacctaaataaggccttcaaaaagaatatatgtaaacaagtctggggcagtgtgaggaccctatgtagaattctgttctctatgtcactggggtactaccagatttgtttcttctaaatgtcctaaaagaaacttaaatccaacagtttctgtaatttaaatattttctagccactgccctgtcaactttatactatatactaatatgcaatttaaacaaaccccttaaggttttctagggtaattttattggaaaataaatatcgtacacttaacaagtgaaagaaatagaaattatacagccggatgtggtggctcacgcccataatcccagcactttgggaggctgaggcaggtggatcacgaggtcaggagtacaggaccagcctgatgagatggtgaaacctcgtctctactaaaagtacaaaaatttgccaggtgcagtggcatgtgccagtaatcccagctactcgggaggctgtgtcaggagaatcacttgaacctggacagcagaggttgcagtgagctgagatcatgccactgaactccagcctgggacacagagtgagactccatctggacatcctcaaatgcctcaaagacacctaggtgattgtgagagattcccagtgatctggggctgatggcccaataataagccaggctggagacttaggctgattctacatagaaaatggaagtgccctagtggagctcctgaacctggatcacctgttctgattttctagctcttgaaagaaagaacaaaaatactctactccagtatcacattttacaggtaaatgtagttgtggtcatggctctggatactttggggccttgatctcttactcctaagatgcttatttacactgacagattctgccctcagattctatttccttctggagcctctcacataactgtagcaggtcaatgaacaagatgtgaaaaatctcaaagagccacactcccaaatggaggctatgtctatgtttacatttcacaacgcagaaaatatcttttgtttgtttctgtacattctcaatcaaaagtccggccctgttttgtaaatccaaggcagaggccagaccttattggcagattctaggcaggatccacctggatttgcatcctttggtgttacagaaagtgaagcacaatcaaaggagagatcccctcatagagtctgctctagcacattctaaatgataaatctacatgaaaaaaagagaaaaagctgacacaacatgaatataagtagacactttattttggtcaaacttaagaattataacctgggagcaaagattcaagttgcctggaatctacagtttgattagcagcagttacaagaggatttgtaatgacaacaagagagggacagagagtgggctgatacaaagttgattgttagaaatttttatttatttacagaaataactgattattgatgagatatatattgtatatatatggttatggtttagggtacgggatatagtgtccaatgtggcattattagtttatagctacttggggcaatagtgtacagtttcaagagatgaatacatatttcaaatggggaagacaggcgtaactacacttgcattttaatgtctctctgagtttgataaccaaaggacttgcattttccagataaaagttttttatttcccaaatctcaagacctggattcaaaatttggagctgcagatttagaacctgaacggctggagtagcagcgggtgttaactgcagatttgtgagcatttcagcaagaggaggaaggggaaagtggagattctgtctacatgtctactcaatgcacacatgttactctgattgggtttttgggccccgtggtgtctgaatcagtttcaggtatgaagatacaatgattgattggtgccccgtggagtttgtagaaatctggacctaacctctctagaagtgactgtagaggattatagataccatataggcagagacacaattctgcctgcatatttaggggacagtgtgcactttgtagcacaggtgtgagttgactggaagtctgagagggaaagtcccctctagagtaaattctggttttcaccttatgtgtttatatcatgtctgctaattctagaccatgcttggaaacaataattaaaagaaaaattttctccagcctcagagaaactccacaataataagatagaaagaaaacattttattacacaattgaacttgaatgtgacatgcatcatagtcaatctgcttaagagactgcaaagacagaaggatggtcaccaaaattagtccacaagtagaagaatttccagcaccatgtcatacataattcatcctaaattcatctggagattgaagaggccatctgtgtatgctaattgcttatattcaatgacaaataaacttttcccatcttcatagcaggaggtagcttagcagcttgaagccaggtgcctgctgaaggtaagatttcactctgctacaaaaatggttgaatagggttctatcttgatttggctatttacattttagagcagtgtctctgcactccctggcactgggctacagcactcctgcttgctttctcctggttactagtgtcctctgttgacttctacaatttgctactgaggcacagcccagagcacagctcacattttatgtgaaccccatttgccacagcagcactctagtgtcacatcagagagtgaggcctgagctgcaggaggagagcctgcaggcctcatgggtagatttacaccttcacaataatgggaatgtaagcagtgtttcagccccagtttctatttataatggtgaaatggaaaaaatactaccgaattcccaggatgagtccagatacccttaccctgaatactctgcagctgcattcctaagcccttatctaggtgccacagtagaatttgcagtcatggtacagcatgcaaaccctaattacagccatatgggcagcatgggggaggtcataggaaatatgaacaaaccttaattacacattcctgtgaactcctgtttttcagctagctgccgccataaatgtcacatgatgaggtgttgcaagttcatggtaaactgataaactgcctttgtgcctgttcctaactgataaactatctagcggcaaagttaactcccttaagcccctctcatctcacataaacccctcactttgtaagctcagggctacctcttctgattgctgtggaccagcccggtaggttaataaacttacttgcctgactttgggtctacttgtcctttctctcggccaaccttacattttggtgtcaaaacctgggaagaggtagactctggccgggcgtccctagaggactttctgtcactctctctctcacactctccctcctcccaggcttgctggtcattgtgcgctggagcctaggtgcctttccccctctcctgccaccccctgctagccaccctccccttcccaaacctgctgaaggcccaaaggatctcctagactctcccattgttggtgacttcattcaccttcagagcctccaaaggggtaagagagagagtcttgccatttacccggaacccttgactgtctctgcattcccaaaagacccagcgctgagccaagggctttcttcagcctccagtcctctggtttctccatttcaggaggcagctacctcctacattccggacagggcttgtgggacaggggacgccctcacctgccatccttgtcaactggcagtctcttcttcctctacccccctcctctatttaccatgggagcttctcattctacccctcctaaaaccaccccccttgggtatcttttgcacaacctcaatgctctcagcctccattcaagggtccatcctaagaggcttattttctaccgtaatactgcctggcctcaatacaaattggacaatggctcccaatcacccgaaaatggcacttttgatttcaacatgcttacagacttagacaacttttgccaccgcaatgggaaatggtctgagattccttatgttcaggctttcttcactctccatagccacccttctctctgccagtcctgttctactttccaaatcctccttgcctgctctaaacctgatttgcctcctaccaccctccctacgaccccagccgacgactcatcccctactaccctccccatcgccccagctgatgactcctcttcctttgaccccaccaattttccccctccccgtcaacatcatgatcctctgccagagcatcatgatcctcctccgtatgcccccgctctggctctacttctttctccccctctctccaacaaccctccttctgactctgagtcctccccatcaccaccccttacccactctcaggccaagcagccagttcccttgttgcccctttgggaagcagcaggggccaaagggatcgtctgtgtccacatccccttctccctttccgatctcttccaagttgaaaaatgtctcggatttttctcctccgatcctgatacctatatcaaagaatgtacgtatcttactcagtcttatgaactcacttggcatgatctctatattatcctgtcttttaccctccttctggaaaagaaggaaagagtgtggctcgcagccccgacgcgtgctgatgatctccatcagcaagattttaccaagcccataggagccgctgcagtaccctggcaggagcctccttgggagtaccaacccacagaccccagcctggcatcccataatcatatgattacttgcctcattgcaggcctaaacaaggctgcccacgaggctgtaaactttaaaaagctcaaagaaatctcccaaaagatcaatgaaaaccttgcccaattttttttcctgtcttatggaggctctccaaaaatatacccatgttgatcctgcctcctgagaaggtgctattgttcttcatacccattttatcttccaatctgcccccaatatttggcacaaacttaaaaaggctgaagatggccctgaaacccccaacaagacctccctaatctggctttcaaagtcttcaataacagggatgagcaaaataaattagataaagcctaaagagatcttgctaaataccagcttctagcagtggctatctgccaacctcgccatagtacccaagggcacaaaacacccaatagcattaactctcccaggccttttttaaagtgaagcaaagaaggccactgggcatgagcatgccctaatccatgaatgccaaaaagcccttgcccagtctgccagcagacaggccactggaagtctgactgtcctgttaacaggcagacagaaaagcctgtactgcaaaaccaccacccttttggagagacaaaaggtgaagtatcacttgcattcccacagctccttagtctagccactgaagactgacgaggcccagggcccctggccccatctaccttcactgcatcagagcccagggtaactctactagcagcaggtaagccgatctcttttttaaatcaatactggggccacctactcaactatgcctgaattctcaggaccaactcatccctcccaggtctcagttgtaggggttaatggactcatctcgagtccacgcaccaccaagcctcttacctgttccctatttcataccgttttctcacacccttttcttatcatgccctgttaccctaaccccatcctaggcagaaacctcctaaccaaattaaaggcttccattaccttcctctgttccccacaaccagactctcacctactcctttctgctactgaaccagccctgggcccctctccccagtatccactctcctcttctctggttaatacaatagtgtgggatactactaccccttccctagctacacaccacgatcctatcaaaatccagctaaaagacgcctccaaattccctaacatctctcaatatcccatctcagtagctcatcaaaaaggcttacagcccatcataaacaaactccttttgcgcagccttctcagtccaactcattctccatataatacccccataattcctgttaagaaggcaaatggctcctatcaactagtccaagacctctaggctatcaatcaggcagtccttcccatccacccaatagttcccaacccttatacactcctttcccttatcccttccaacacaacctactacactgccattgatctgaaagatgccttttttgctattccctttcaccctgactcccgagatcttcttactttcacctggactgaccctgaaaccctccagtctcaacaacttacttggaaagtcctccctcaaggctttagagatagtccccatttctttgggcaagctctggcccaagacctcacatcgctaaacctctccccttgctggctccttcagtatgtggatgacctcctcctctgcagcccctccctaaaagactctcaaacccacactactgcccttctaaacttccttgctgataaagaatatagggtttccccctctaaggcacaactctccaccccaacagtaacttaggagtccaactctccctcagagcccaagccatgaccccagcacgggagatagacagtctacgtccacccttctccaaaagagaaatcctttctttcttagaactagcaagatccctaattttgccctcctagcctgccctctttatgaggcagccaaaggccctccaaatgagcccctaaatccttcacacaacataatccccagcttcctcaaactaaaggcagctcttgtaactgcttctgctctatctttgcccaacatctctcagcctttcaccctctacacagctgaaaaccatggaatagcccttggcgtcctcggtcaacaaaaaggaagtcctccttccttcactcctatagcttacctttctaaacaactaaacaacaccatctgaggatggccagcctgcctcagagtcctagcagcagccaccatgctagctttagaaagcaaaaagctaacattcagccaagacatcaccatatatagcccacataatctacaagatcttctctcctcccaagtactgagcaccttttctccttcccacatccaactactccatgctctttttcttgagaatcctgaattctgcctctccaaaaatgctcccctcagtcctgcatctctacctccagtgtcttcctcttctcccatccactcctgtactgaaatccttgatcacctgctgcatcattttcccaatatctccccggaacctcttcttgatcctgatgaccagttatttatagatggctcctcctccaagtccgtcaattccaataaaattgctggatatgcttgacagagtagttaaagctaagcccctaccccctggaacctcctcccaaaaggcagaactcatagctctcactagggccctaaccctctcaaaaggcaaacgggtcaacatttttacagactctaattataccgatcacattcttcattctcgcaccaccatctggcagaaaagagattccttactgccaaaggaacccccgttaaaaacggcccccttatttaccagctcctccaggctgcatgcctcccaacttaggcaggggttatatactgtcagggacgtgaaacagtatgagacaaaatatcaaaaagggaatagaaaagccaacgaggctgcaaaagaagcctccctctcatcagcccctgcccctgtcctccttgttaccccagcaatccaacccaggtactcccccaccaagaaggctttgctactacagcaagaagcctcctttcaaggggactggataatcaaaagtcaaaagctcatcctcccccaagaacaaaccaaataaattctaacatctcttcaccaatccttccatatcggtgcacacttcctgtacctactcctttgcccttatttctcctccccccacctattcatctcactaagacacataacctcaaactgtcatatatgctctgttacttcctcccaaggggccctccgctctcctcctattcctacacatcagctcagaggaacactcccagaggaggactgacaggtagacttcacccacatgcctcccgtcaagaagacaaaatttcttcttactcttatagacaccttctctgggtgggtagaggcattacgtacctcttcagaaaaggccgcagtagtctctcaaatccttacaacagaaatcatccctatatttggtctccctcactccatacaatcagacaatggccctagcttcatctcccagatcatccaacaggtttttcagtcccttggcgtccagaggtgcttccgtatcccataatggccccagtcatccagaaaagtcagaagggcaaatgggatccttcaggctcagttaaccaaactcaagcttaaagtccaaaaaccatggacctcccttttgcccatagcactggcctgcatcagagcaagtccgaaatcacccttcttccttagcccatttgagttaatgtatggacgccctttcctcttacaaaacaggcctcctctcgactcccagctaggagaatatctcccaaccttctcccttatccgtcatctcctctgtgaatgatcaagccctcccaaaaccccacaaaggccccactgactggactctcctaccaggaaagtatgtcttcctaaaaactcttaacccaacaaggctaaaaccaaggtgggaaggcccttttcaaattatccttacaacccccactgcagccaaactcaggacatgcctcttggtaccatctttccagagtaaaaagggctcctgcagtgcctactgaaccacagactgtcctccaccaatcctccagcaccctcctttgtccaaccaaactctgcctgacgcccatccctgaagaaggcccacgagcggtaactcttttacatatcacttctgcccctgctacagatgccaaggtcctcgtgacaaggaacagcctcaccctacagcataccaaatattagaatccctctcttctctccccatttccacatgaggaaaagtcttaacccacctataccttgcccatctgcaaggagaatttgaccatccatgggacgctatcagccacctcatagaccccctagaagaagccacctccctgtatggatcctaccagctcctctctccaacaacagattctgattcttcctcagattcctaattcttttgacagccagccccatggcctctacctcctcagggtcccttctcacttctacaagtctcgaatgatctctcaacctcactcactttttgttactgtgctccaattcaacatttgcttccagtttctggacctatttttgcctttcctctactgcctactcagctatcccaatttcttagccctgagaccattttcccattcacttctcttacaacatccaaaagggacctgcctttgtagacagagccctcactctcactggaaactatcccactgccctcactgacagagctaccaagctcctcttcaatctatattgccaactatgatgactcaaaactcccataccccaccatccaaggtctcataactctccataccacaagacttggccaagcccccttatgcatcacctcttccaatggacacgtacacgtaggcaccctccttccctctgcctgtaactcaacccgaaccatctctcacccttcctcccatatctcactctgagtggattattcagtctcccctgaagtcaacggtctctttactcagcccttctgcatttcctccctcccacctctcaaacatggaaaccccttccttggacaggagtgctcaaaggggtttctgtctctttctcactctgggttgctgaagctgagccaagtccctccaagtggggaacctacaaactgcaacacctactctcaatccacctgtctgtttgcataaatacctcaggcatcttctttctctgcgggtccacaacatacttctgtctccttactaactggacaggcacttgcgccctagtctgccttactcccaacattaacattgtcctttcaaaccaggaactccctgttccagctacaatacatacccactcaaaaagaacaatacagttgattccctattcacaatagcaaagacatggacaggccctaaatgcctatcaatggataaaggaaacacggtatggtcagacgcggtggctcatgcctgtaatcccagcactctgggaggctgaggcaggtggattgcctgagcttagaagtttgagaccagcctgggcaacagggcaaaatcctgtctccatgcaaaatacaaaaatagaaattggccaggtgtggtaaagcacatgtgtagtccccccacaccaagtacttaggaggatgaggtaggagacaattgcttgagcctgggaggttgaggctaaagtaagccaatatcatgctatgacactctagcctgggccataagtgtgaccctgtctccaaaaataaaataaaataaaagatttagtaaaaacaaaatatggtacataaacatcgtggaatactctgtggccattaaaaaaagtgatcatgtcctttgcaaaaacatcagtgaacctggagaccactattcttagaaaactaacggagagcctgggcatggtggcttgtgcctgtaatcccagcgctttgggagggaggtgggcaaatcacctgcagtcgggagtttgagaccagcctgaccaacatggaaaaagcccatcactactaaaaatacaaaattagcagggcatggtggcatgcacctctaatcccagctactagggaggctgaggcaggagaatcgcttgaacctgggagacgaaggttgcagtgagccaagattgcaccattgcactccagtctgggcaaaaagagtaaaactccatctcaaaaaacaaaacaaaaaacaacaaaaaaagagaaaactaatacagaaacagaaaaccaaatgcatgttattatttataagtaatagctaaataataagaacacatgaacacaaagagaagaacaacagacactgaggcctagatgagggtggagggtgggaggactaagaggatgagaaaacagacctgtttggtgctacgggtagtacctcagtgacaaaataatctgcacaccaaacccccatgacataattttagctgtaaaacaaagacacatgtatatcccgaaccaaaaataaaagctaaaagaaaaaatatccctggatggcagagtgcaatgtagctgaaaggactgattttcactacagatagtggcccaggtggggctgtactgatttatttctgtgtgaatgcaggcagatgagatcatgaacaggtggcccagaagcttaggttggtggagaaaacaagttgctgctgcagattcagtgtctgagggtggggatatgccagaagacttgtagacacttgtgggttcttggcaagaaacactaggatcaaaaatgcagtggtgaagttcctgagggtggtgcctagtcctgggaggagtgtggacacatcaatgtctagtgtgtgtgtgtttgtgagtgggtggaaatcctgtggtggcagatgcaagacaggggtgtctgttcttagaggtccttttctctaagttttcagtcttctgtcaccctgggagaagacctggaatcacaggaaaatgggcagtgtgacagcctgtgtacaggagagcagagcctcccatttccagaaacccagagttttactccaggccaggcctccataatatctttttttctggcaccaaatctgtagtttgctgaacatcaaactatcctccaacaccaactcattgtctaacatttgaattctgacaccacccagagtcagcacagaccctgattcagggctcggtcccacaacactgtcctcactgcagatgccagccacaaaccccacaggcccatctatgcttcggagccactatttaaaaactggggactcccatcgcctccctgaagttcaataatttggtagagctactcgcagaactcaggaaaacactgtagttatgtttactgttttaatatataagatgcagcccaggaaaagccaagtggaagaaatgcatagaacaaagaaaagagatgggggaagatgaaacacatagataatcctggaaaatatttgtgattaataaaattctccatcctttgtgtgctccaggaacagtttatggaaagaaacactcttcccattatgacttagatagtcctctgttttacctatcacacagccagacacacactctgcagattttctcctttttctcattagaaaaatcagctgaatttgtcttcagtgatcaaaattattatttttttttaatggagtctcgctttgttgcctaggctggagtacagtggcttgatctcggctcactgcaatggctgcctcctgggttcaaccaattctccttcctcagcctcccgagcatctgggattacaggtgcccactgtgacacctggctaatttttgtgtttttagtagacacaaggtttcaccatattggccaggctggtctcgaactcctgacctcaggtgatccgcctgccttggcctcccaaagtgctgggattacaggcatgagccacctcacttggcctaaaataaaatatttcttaatcaaatttaagcttatatccctcccttaggctcctgaactttgagctaccctcagtctgagtcaacatacaaccccattttatgtccctcctaagagcatgctgatttcagggtaacacattctctgatctaaaatctgactttttcaccctccatttgccattcccctcccacctactttctaatcttgtttgctcctccctaggaaagaaagcccttttcagcctacatctttgcaagccacaaagaccttccttatagttagttggtacttcctcctgttgcaataattttttggaattttttttacataaatctaacatttttattttacacagtctaaaaaatgcctcaaaacagtaacaacttcatcatcagtaagaacctcccagtttcctttcaccttaatcttaactgcatctgcctgtggggccccagctttccagggctctgtagcttctctcagaataaaggatccttccatggctggggtgagcaggctgggacatctgcagtggagactccccagaaaaaagtaactgggcctttaataaccttctgttggccgggctcggtggctcatgcctgtaatcacagcactttgggaggtcgaggtgggcggatcacctaaggtcgggagttcgagaccagcctgaccaacatggacaaatcccgtctctactaaaaacacaaaattagccgggcgtgatggtgcatgcctgtaattccagctactccagaggttgaagtaggagaattgctttaacctgggaggcagaggctgtggtgagccagatcacaccattgcactccagcctgggtgcacagacacacacacacacacacacacacacacacacacaccaaaaacaaaaaacaaaacaaaacaaacaaccctctgttgcaggcttaatattagccttagcttggaatcactaggttcaagctttaatttccatgtcagagttattcactttgtttttgaaagtaagtgtttgaaaattccagtgaaattactcaaacacagtgtttatataagggaaggaaattttaagatgcttactttttttttttttttgagatggagtcttgctctgttgactgggctgaagtgcaatggcatgatctcagctcactgcaacctaagtttcctgggttcaagcaattgttgtgcctcagcctcttaagtagctgggattacaggtgcttgccaccatatccagctaatttttgtatttttagtagagactcagtttcaccatgttgaccaggctggtctacaactcctgaactcatgatccactcgcctcagcctctcagagtgctgagattacaggcgtgagcctccggggatccgacgcacaatcccggttggcttacccttaaactttttccaaatagggtaaactcgtgattttgcgagaaaaggagaaggggaaagaagaagggatagggttgatttacagcttttacaacttatgaccaggaagttgtctttgaagaggaacttcgttgtcccaacaactccttacctcaagtgatccacccaccttggcctcccaaaatgctgggattacaggcgtaagccacctaggctcgccccataaatttttaataggagaaaagagaaactgtcaaccccatggtccaaagctcttcccattcatggacccgcaccccgagtcaggattctcccctgaccaccctcccgtggtccctgcacaatctgggagagacgccacactgcaggcgcagagctgcccagacagggctccaggccagggcacagtcgctgcacagggaagaggcaggacacccaggtgtggggaaaaggaagagagatcagatcgttactgtgactatgtagaaaaaggaagacaaaataaactccattttgatctctagtaagaaaaattgttctgccttgagatgctgttaatctgtaactttcgtccctaccctgtgctcacaaaaacatgtgctgtgtagactcaaggtttaatggatctagggctgtgcaggatgtgctttgttaaaaatgtgattgcacgcagaatgcttggtgaaagtcatcgccattctccattctctattaaccagagacacaatgcactgcggaaggccgcagggacccctgcccaagaaagcctgggtattacacaggtttccactgactgagatagcctgagatatggcctcatgggaagggaaagaccttacagcccccaagcccaacaccagtaaagggtctgtgctgaggaggattagtgaagaggaaggcctctatgcggttaagaggaaggcatctgtctcctgcatgcctctgggaatggaatgacttggtgtaaaaccgaccatacattctattctgagacagaagaaaactgccatatggctggaggcgagacatggtggcggcaatactgctctgctactttttaccacaatgagatgtttatgtaaagttaaacataaatctagcctacgtgcacatccaggcacagcaccttcccttaaacttatatatgacacagagtctttcgcttacgtttttctgctgaccctctccccacattcaccctatagttatgccacattcccctcgccgagatagtaaagatagtgatcaataaatactgagggaactcagagaccagcgcgggcgcaggtcctcacttgctgagcgccatccactgggcccacttttcttcctctgtactttgtctccatgtcttatttcttttctcagtctctcatctccaccttgcgagaaatacccatgggtgtagaggggcaggcccccttcacccgggattctggctgtcagcacagctgccgtcttatggctgaaggggactgaggccaagctgggcaaggagaactcgggcgcagattgtggagattactgtggggaggcctgagtcccgccacagccacatcaccccggttccaactagcccctccctcactctcaggatgtcggactggcactgtcactgtttctaggcttccagggggtcctggagtcttagctgtggatctcccaaaacctgcaggtcagagggacacagagcctgggcctctaggagcagacgacacagagtagtgaagaccagacctggagctcccgctgcagcgagagacaaaggccccaccaaacccagaagtcgtcctgttcgcttcagcttcatgcctgatttgaggatttcctgcccagcgtccctgactggataatgcttaaggctccgccccttcaggccctgagtgacagaagatgtcatcagatgctgggctgagtgaagaaagactgacaacctaagctgcagccttttcaggcagggtttcctccctgagctgagccaagcccaccccagagcttggggaaattctctctcttctttactctctctttttgaatttattcaaaaggtgaacagaagtattttgctttcatattaataatacataaaatttttgttcaagagaaaatcaacttttactttggtagtagtgtattttgaatactaaagctaattttaataaaccttataaataaatcaaatttgtcatttttgacctctcaagatttacatatatattttgtaatctcttgtaattttttaaattttttctattttgtttttacctatattctttttattatttcaattcaaaacaacctttaagtaatttcaaactgttataggagatagaaagaagtcatttagggccagccacggtgactcacgcctgtaatcccaacactttgggaggccaaggtggacagatcacttgaggtcaggagtttgagacgagcctggccaacatggtgaaaccccatctctaccaaaaatacaaaaaattacccaggcgtggtggtgcacacctgtagtcccagctactctggaggatgaggcaggagaatcaattgaacccaggaggcagaggttgtgtaatggcccaaggagttcaccttgccctttgcctagacagagccaattaatcaagatgggggaatttgtggaggaaaagttaaatattaaatttgaacttaattgaacatggacacaaacaatagtcaacaagtcatggaacaggttgtgtgagccccttgaggcattcatccagcgctgttttggagaaatctctattttaatctattcctatacattagttattgaaaaacaatagacaatcgcaaaaaaagttgatcttcttgtgtttcttgagcccagtcgtgaagggccctcgtgactgggcctcatgccaaacaactcgttacaaaaagagctaggatcccagactgcaccgaagttttgtgagacctctccttgtctgtgcacggatggctggatgactctggagcccaagctgttgcttcccagtctggtggtgaaccctccatagtccgatgagtgtggtgtccaactctggagcccagcctgttgcttcctggtctggtggtgagtctccatagtctggtgtggaggcaaatttgaatattaaatttgaactaattgaatgtggacacaaacaatggtcaccaagtcctggcacaggttgtgtgagcccattcaggggttcatccagtgctgtttaggagaaatctctatttcaatctattcctatacattcgttattgagaaacaatagacaatcacaaaaacaagttgacctttttgtgttccttgagcccagtcgtgaagggccctcatgactaagccccatgccaaaaaacttgttacaaaagagctagggtcccagactgcactgaagattcatgagagctctcctcttctgtgcacagatgagtggccgactctggagcccaggttgtttcttcccagtctggtggtgaatcctccatagcctggtgagtgtaaatatatatatatctcttttccattctcctcttcccatcacaatttgcttattatatcaatctgcttattatattgatttgcctattatatcatttgcccattatatcatttgtttattatatctgtgtagggtccagccccatagggttggtgggtttttctccctgtgtgcagagatgagagagtgtagaaataaagacacaagacgaagagataaaagaaaagacagctgggcccgggggacaactactaccaagatgcagagaccggtagtggccccgaatgccaggctgcactgatatttattggatacaagacaaaggggcagggtaaggagtgtgagccatctccaatgataggtaaggtcataagaatcacgtgtcctttggacagggggcgctttcctgcctggcagccaaggcagagagagagaggtgagagagagacagcttatgccattatttctgcttatcagagacttttagtactttcactaatttgctactgttatctaaaaggcagagccaggtgtacaggatggaacctgaaagcagactaggagcgtgaccactgaagcacagcatcacagggagacggttaggcctccagacaactgcaggcaggcctgactgatgtcaggccctccacaagaggtggaggagtagagtcttctctaaactcccgcagggaaagggagactccctttcccagtctgctaagtagcaggtgtttttccttgacactgactttaccgctagaccatggtccgctcggcaacgggcatcttcccagatgctggcgttacccgctagaccaaggagccctctggtggccttgtctgggcataacagaaggctcacacttgtcttctggtcacttctcactatgtcccctcagctcctatctctgtatggcctggtttttcctaggttatgattgtagagtgaggattactataatattggaataaagaataattgctataaactaatgattaatgatattcatatataatcatatctaagatctatatctagtataactattcttattttatatattttattatactggaacagctcgtgccatcagtctcttgccttggcacctgggtggcttgccacccacatatctgcattgccatttatgtggtataaggcttgttacccttaaaagtattgtgtgtatcttttcttctcctcttgcatgtttcccacccagaacatttttggtgtcacaaacaggatttgaaaacaaaaggtgcaggttttggccagaaggacagggctggaggcttggggacttcccatatatcgggatgggaactccaccagttctcccccatggcaaccgaatggtcaaggggaactggcctttgtgggaattgagaattaaattagtgcaatttaaacctttgactgtgcgggaagtgctgcaggagattccagtcagcaaaggagatgctgagggatcccctggagtcgatggtgtttgcttactgctaataaattaatgtatcaagagaggggctggttgctacaagatattttaagttggaaaagaaaaatgctagtgtgatttccagactggccctggcccaatgccaggcctatatcttgactgatcaggctcaaagctatcaccctattactgaaaaaagcagccgtccgaatggctcggttaggttaaaactgaagagctagtttgctggggcttggagcaggtaaaaacccagctcctacctccaggatgggaaattaaacttagtaaaattcaaggacctgcataaactgtaaaattccttggcatcctatggaatgcagagatatagtccattttacaaaaggctaaggctaaaatattagaatttgcaaaccctactacttaaaaggaggcccagacatttattggctggtttagattctggagacatcatattccccacttgggtaacattttacaacctctgcatgcagccactagaaaacgctatgactttcactggggaaagaaggagaacatggcttctgaacaagctaaatgagtgggtcaactggccctggatctatggcccatacaggatgggccaggagaactgcaagtaactgtcctagatcaaaatgctaattggagccttaggcagaaacaaggtgggaagagggtacctttcaggttttggacccagaaactgccagaggccggaaaagcttatacccctttcaagaagcaattgttagcttcttattgggctttgctggaaacagaacacctctgcttcaaccatgatgtctttatgaggcccgaaactcctattatgacttggctcatgagttcccccaaaacccaccagatagggcatgcccaagaaggagcatcataaaatggacgtggtacatacaagaccaggctaagccaaaaccaaagtgggtatcacttttacatgaggatgcacaaaacctgccagctcaggaaatcatggagcaagtcctgcaggtagggaaggaaatcccctcactcccacccagtggggcaaatcctttgaagaactaagcccagaggatcagaaacatgcttgatttacagacggatccgccaaatacattggtgggacctgatgctggaaggctgtggcttataatcctgttaaaaacataaaaatttctgatgaaggaaggggtgggagcagcgagttagctgaactagtagccatccttcaagctattcaggaggaaggcagagggatttctcacttgtataccaaatcttggtcagtaccaaatggtctttctacctggaagccccaatgacaatgaaacaaatggttaattcagaataaagaggtttggggacaacaatacttggaagatatctcaatccattgcacactgccattatcactgtttcactgttatcactgtttcaacaaggtttcaccatgttggccaggatggtctcgatctcctgatctcgtgatccgcccacctcagcctcccaaagtgctgggattacaggcgtcagccaccatgtgggggaaagaaagagagatcagactgttactgtgtctatgtagaaaaaggaagacataagaaactccattttgatctgtactaagaaaaattcttctgtcttaagatactgttaatctgtaaccccagccccaaccctgtgcccgcagaaacatgtgctgtattgactcaagatttaatgtatttagggctgtacaggatgtgctttgttaaaaatgtctttgcagacagtatgcttggtaaaagtcatcgccattctccagtctcccgtacccagggacacaatgcactgcggaaagccgcagggacctcatgcccaagaaagcctgggtatcgtccaaggtttccccccactgagacagcctgagatatggcctcatgggaagggaaagacctgaccatcccccagcccgacacccataaagggtctgtgctgaggaggattagtgaaagaggaaggcctctttgcagttgagataagaggaaggtatctgtctcctgctcatcgctgggaatggaatgtctcggtgtaaaacctgatcatacattctatttactgagataggagaaaatcaccttatggctggaggtgagacatgctggcgacaatactgctctttacgacactgagatgtttgtgtaaagtcaaacataaatctgtcctacgtgcacatcaaggcacagcacctttccttaaacttatttatgacacaaagtcctttgctcacatgttttcctgctgaccctctccccaccattaccctgtagtcgtaccacatccccctcactgagatgaaagagatagtgatcaataaatactgagggaacttagagaccagtgccgggtgcgggtcctccgtatgctgagcgccggtcccctgggtccacctttcttcctctatactttgtctctgtgtcttatttcttttctcagtctctcatctccaccttgtgagaaacacccacaggtgtggaggggcaggcccccttcaccaccatgtgcagccctgttttccatgttgatgcccatgcatctctgctttctcttgacaggctatttaatcagcaggaagaaaaacaggccacaatttccaccataacagtaaacttgaatgtggatgaatagattacaatgtgttcaagccttgcaaagagaggcattatagtgtatggtggtgtaattgatagtgattaccagggagagttaaaggtcattttatacaataacactccagattcttttgctataaaactagatgctggttactcaatttttagtggtacccttgtcaacaattaactcctgaggaaatctctgccccaacagagtctacatacagaactgggggattcagatcccctggtacaggtagcttaaatcctggagccaaaatatgcatacagcgtccatcacatcttgaccctaaggctggtgaccttgtagctatgaaagcgggaaatgaaggcatagtacaatttcctaaagatgaaaaataaatcatgttccactccatttttgttattacagggaataacctatctactaatggtcagcacctgtgtctttgtgtctgaagccaagaataaattcatcacctgggtagccaccgctgcaactgaagccatccacagtcaatgttggctatatgttgagttgccggaggctgcctgggatgggctatcttgaagaatcgtccctgacaacatttctgaatggctatattgttaccagtagggccacaacaacaacaacacttgcaatccaacctgggcttcctttcaccacactaagcaatctatctttgccaggtcagacaaaagatgaactccaccctcaccttgcatcaaaagtcttgatatcttgcccaataatcctggaacaatatacactgaaaacctgctgtgctggtggctggattccatacaggcttcgctttttctggaggccttaaatggctcctctaatgtttctttggggtttcttcagacatttgtcaacacatactccaaatcaacaacactgccccccaatgaaccacaatctctttcctattttaataacacattagtacactatgattacagtagctccattgctgtcccctggggggccctctgggtatgcagatcctatgggttgcaatactgtccctgcattggatgggaagatgcacttgagggtggacattaattccattcactatccgggataatattcccttccccagtaatctagatgcttacaaacaccactggttacaaatgtgctggtctccctggtggtggtaccctatcacagtattctcccctgccaccagtacattcctccttcaccaacacattaaaatatttaccttacatgtagaaaaagctcttaatgatagtagcactgaacttgtgttgttatcagatgaatttgctcagctgcgtactattgtgttgcaaaatcaaatggcattaaaaatgcttaccgcagcccaaggaggggtttgcacgttactgcaaactgaatgttgtgtgtatatctctggtaattctcacaatatgactctccttggaaagccatgctgagtgtggtttttattaattgtgcttttaattctcctgtgttaccctgtatctgtaatctatatcaattatgccttttccatgtatctgagagggtattttcctacaattgagtatccaattgaggccaaatgtggagggaaagttaaatattaaatttgaactaaattgaatgtggacacaaataatggtcaccaagtcctggcagaggttgtgtgagccccttgaggcgttcatccagtgctgtttcagaaaaaaatctttatttcaatctattcctatacgttagaaattgaaaaacaataggcaatcccaaaaacaagttggcctttttgtgttccttgagcccagtcacaaagggcccttgtgactgagcctcatgccaaacaacttgttacaaaaagagctagggtccaagaccgcaccaaggcttcaagagacctctcctcgtttgtgcatggacgggtgaccgcctccggagcccaggctgtttcttcctgctgtggtgacaaatcctccatagtatggtgagtgcggtgtctgactctggagcccaggctgtcacttccctgtctggtgacaaatcctccatagtctgatgagtgtaaatatatatacatgttttttcccttctccccttcccattgcaatttgcttattatatcaatttgcttattatatgtgcatggccatttacatggaataaagcttgtttacccttaacggtattgtgtatgtgtcttttcttctcccctcatgcatttcctacacagaacaccatatttctcagaggctttgtttgctccttttaattcttttttctgtaaacttgtctgcatgcctcatttcggcaaggtggtcttcaaactctgatatcctttcttctgcttggtcaatttggctattgatactttcgtatgcttcacgaagtttttgtgttgtgtttttcaactccatcaggtcatttatgttcctctttaaactggttactctatttagcagttcctctaaccttttatcaaggttcttaacttctttgcattgggttagaacatgtttctttagctcagcggagtgtgctgtcacacatcttctgaagcctacttctgtcacttcgtccatctcatcctctgtccagttctgcacccttgctgaagagacattgtgatcatttggaggagaagaggcacttgggcctttcaggggtttttgttgattctttctcatcttcatgagtttgtctagtttccatctttgagactgctgacacttggatgagtttttttgttctgttttgttttgttttgaaatagagtctcactctgtcacccagtatggagtgcagtggcacaatcttggctcactgcaacctccgcctcccaggttcaattgattctcatgtctcaggctcccaagtagctgggactacaggcatgcaccaccacggcagtctaagttttgcattttttagtataggcagggtttcactatattggccaggctggtctcgaattgctgacctcaagcaatctgcctgcctcggtctcccaaagtgttgggattacaggtgtgagccaccacgcccagccttggatggggtttttgtgggtatgcttttgttgttgatgctgttgttgtttcttcctgtttgtttgtttttctttcaatagtcaggtccctcttctgtagggctgctgcagtttgctggggggtcacttcaggccctattcatctgtttcactcctgtacctggagatgtcactcaagaagtttcgagaacaacaaagaagggtgcctgctcctttctctgggatctctgaactcaagaggcaccaacctgataccagtaggatcgctcctgtatagagtgtctgacaacccctgctgaagggtcacacccagttgggtggcatggggagcaaaacccattaaatgaagcactttgactgttccttggtggaggaggggctttttgctagggaaaatcccactcgtctgggctgcccgaattcctcagagcaagcaggaggaaaggctaagtctgctgattcacagaggatgcagcctcttctccccctaggggctcaggcccagggagatcacagttctgtccctgagcccctggctggagctgttggagttcctgctgggaggccctgcccagtgaggagggatgggtgagggtcaggcctgaagagacattctggctgcagtcagccacagccggtgtgttgggctgtgggggacacctcttgagaccaagctgtccagcctccctggctctagcaggggaaaagtgtggtcaggagctatagatatggctgctgcctttccccacccagggatcttagcctgttaggcagttgtgagtccccgtgctggctgctgtccctcccccaaggagctcaaacagcttagacagcagcaagccacagctgtggtgctggtcgtccctccactgggaacttagcaggcttaagcagattctagctgagaggctgttgagaatctgctcagctccagggttgtgtcaggcacagtaagttcctcttcaaagggtaacttccttgttctttgttctcaaattcaacttccttgtaccttcctgctcctaactacctgctcttcctgccagtaaacaactcttccagccagtcccaatctgtaacccacatctcttcttatttggaagaagtcctcctcactcctagttacctgctctgtaaacaaacttcccgcctttctctatttagccaatccagttagtttagattgtgcagtctgactccagccaatggggacaggacacagaagtagggactgcattagggataaaaaccccttccctctcttgtatggtgtgctctcacaacagccagagacatgagcagcctcttctgcagaagtaaatttgccttgctgagaaattcgttgtttgagtgctcattttctttgtgactccaagctcttgtttccaacagttggaaccttaggctccagtggcgtgggttcacaagttgaatcttctaatcagtgggattcactgttccatagagaaagcgcagtttcccagactgagtagcctgctcactcactgccccccttggctggggctgggggctccccagccccatttggctgtcaggtgggttgccacaccacactgcttttccttcctctccatgggtcacaccagccacctagtcagttctgatgagagaaactggatacctcagatgtcagtgcaggattcacatgctattatggttcttttctatgggatgctgctgctagtcagccatcttggccccacccccaccaatttttctttgaatgtctgatagagttcagcagtgaattcatctggttctgaacttttgtttttgcttggcaatttgtgaaattattatttcaatctcactgcctgttattagtctgttcagagtttgtttttttaatctaggaggattgcacatttccaggaatttattcatctcctttagattttctagtttttgcatgtaaatgtgttcatagtagccctgaatgtgatcttttgtatttctgtggcatcagttgcaatagcttccatttcatttctaatggagcttatttggatcttctctcttcttttcttggttaatgctgttaatggcctatgaattttatttatgttttctaagagttagcttttcatttcatttatcttttgtattttttttccgtttgtttcagttcatttagttctggtctttcttttcttctgctaggtttgggtttgacttgtttttgtttctccagttccttgaggtgttatcttagattgtctacttacgctctttcagactttttgatgtaggcatttgatactatgaactttccttttagcactgcttttgctgtatcccagatgttttgataggttgtgtcactattatctttcagttcaaagaatttttaatttctatcttgatttcatccaacgatcattcaaaaatgggttgatcttaagtttaatgttttttccaaaatttatttaattttcaagtatttgcatggttttgatggttcatttggagttgattttcaattttattacactgtagtctgagagagtagttgatatggttttgattgtcttaaatttattgagacttgttttgtggcctatcatatgtctatcttggagaatgttccatgtgctgatgaattaaatgtatattctgaagttgttgggtagaatgctctgtaaatatctggcaagtccatttcttctagggtatagcttaagtccattttttttttgttattgttgactttctgtcttgatgacttgtctagtgttgtcagtagagtattgcagtcccccattataattgtattgccatctatgtaatttcttaggtctagtagtaattgttttataaatttaggagctccagtgttaggcgcatacatatttagaattgtgatattttcctattggactagtttctttatcattacataatgtccctctttgtctttttctttttgactgtttttgctttaaagtctgttttgtctaatgtaagaatggctactactgctttcttttggggtatatttgcatggaatatctttttctaaccctttaccttaagtttaagtgagtcgttatgtgttgggtgagcctcttgaagacagtagatatttcgttggtaaactcttatccattttgctattctgcatcttttaactggaatatttaggccgtttacattcaacgttagtattgagatgtgaaggactattctattcattgtgctagtcattgcctgaataccttctttattgtgttattgttttataggccttgagagatttatgccgtaaggaggttctatttcattgtattttgaggttttgtttcaagatttagaactccttttagcagttcttacagtagtggcttggtagtggtgaattctctaagcatttgtttgtctgaaaaagactgtatctttccttcatttatgaagcttagtttcactggatacaaaatttttggctgatacttgttctgtttaaggaggctagacagaggaccccaatcgcttctagcttgtagggtttctgctgagaaatctgctgttaatctgatatgtctttctttataggttatctgatgcttttgtctcacagctcttaaaaatctcttcttcatattgacttcagataacctggtgactatgcgcctaggtgatgatctttttgtgatgaatttccttggtgttctttgaacttcttgtatttgcatgtctagatctctagcaaggccaggaaagtttttctcaattattccctcaaataagttttccaaacttttagatttctcctctaccttgggaacaccaattattgttagattttattgtttaacataattccaagcttcttggaggcttagctcatttttaaattcttttttgtttgtctttgttagattggaatattcaaaagtcttgtctttgaggtctgaagttctttcttctacttgtttggttctattgttgtaatttcccactataatttgcatttctttaagtgtgcctttcatttccagaagtcatggttgttttctatttatgctatctatttctctggagatttttttcatccatatcctgtattttttaaaaatttcattaagttagtattcacctttctgtagtgtctctttaagtggcttaataatggaatttatgaattctttctctggcaattcagggatttttttcttggtttggatccactgctagtgagcttgtgtggtcctttgaaggtgttaaaaaaaattcttgcttttggccaagcatggtggctcacagctgtaatcccagcactttgggaggctgaggcgggtggaacatgaggtcaggagatcgagaccatcctggctatcacggtgaaaccccatatctactaaaaaaacaaaaagctagccaggtgttgtggtgggtacctgtagttccagctgcttgggaggctgaggaaggagaacggcatgaacctgggaggcggagcttgcagtgagccgagatcatgccactgcactccagcctgggcgacagagtgaggctctgtaaccaaaaaaaaaaaaaaaaaaaaaaaattattgcttttttatattaccagaattttgttttggttccttctcatttgggtagtctatgtcagaagtaagacctgaggctctaggctgctgttcagattcttttgtttcatggggtgatcccttgatgtgatggtctccccttttcccttgggatggggcttcctgagagtcagactgcagggattgttattgctcttctgggtttaaccacccagtggagctactggtctctgggctggtactggggagtatctgcaaagagtcctgtgatgtgatctgtcttcaggtttctcagccatggataataccacctgctctggtagaggtagcaggggactaaagtggactctgtgagggtccttggttgtaattcagtttagtgcactggtttttttgaatgcaggttgttctagcagtgaagttgtcacatggacagactgaagacttctgtgtagccaggatgttacaatgttacaggtggaattagctgttgttttctcctttattggagtgggttttttttttttttttttttgagatggagtttcactcttgttgcccaggctggagtgcagtggcacgaccttggctcactgcaaccttggcctcctgggttcaagtgattctcctgcctcagcctcctgagtagctgggattacaggcatgttccaccatgcctggttaattttacatttttagtagcgagggggtttctccatttttgtcaggctggtctcaaactcctgacctcaggtgatccacccacctcagcctcccatagtgctgtgattatgggtgtgagccaccccacctggcaggggtcattattttgtgagttactgtaagggcttgagttggttggcctccaacctggaggtggcagctttaagacagcatcagctgtggtaatatgggggtatgcaagcttgccaccaggtcacctggataagtattcatgtttttcaggcaatgagtgggaacatagagctcccaagagagtatgtcttttgtcctcagctaccagggtgggtagagtaagaccatcaggtgagggcagggttggacatgtctgagctcagaccctccttgggtggggcttgctgcagctgctgtggggttgggagtatggttctcaggccaatggagttatgtttccagggggattatggctgcctctgctgtatcatataggtcaggatggaagtgaaggaaagccagcagtgacaggcctcactcagctcccatgaagccagcaaggccagtttcactcacaccctacccaccaacagcatcaagtttatatccagttggtgagcagtactgagatcttgccccaggctataagcctccccattgagaaagcaacctgggctttcaggccccacccctcaccacctgccatggattctgtgcccatatctgtgcttcccattcactgtcccctcaccgattctgccaaggaaaattcacactaggtcaaaactattacaaagtttagctggcagtttccttctccctgtggttcttccccaattccactggcagcccgtcccaaggacccctgtgagataaagtcagaaacggcttccctgaggaccaagagtgcctgtagggctcttcccactgcttcttctacttttatattttgcttggctctctaagttcatttcggctctaggtgaggttaaatgcttctctggtgatctggattttcaggttttgagtatgtgtgtttagaggtgaatgttccgtctcttacacttttggcactttctgtttttcagttgtctcgcagaggttgcagtggcaagccacttctttcaaagagtctgtgcattcttttggttttcctggtatgtttctatggtagttcttggagcaaaagttcatgatgagagtctccacatgctgttctgtccatccaagtgggagatacaagttagtcctgtctcctagccaccattttttctttttgccttttgagagaaagatattgattgactcttcatcagagatttaaaaaaaactgttaagtaggacttctctctctttctttttcttttcttttttttttcttttttcttttcttttttttttttttttttgccaaggagttttattcttgttgtccaggctggagtgcaatggcacgacctcggctaactgcaacctctgcctccctgattaaagcaattctcctgtctcagccttgtgagtagctaggattacaggcattttgtatttttagtagagacagtgtttcaccatgttagtcaggctggtatcgaaatcccaatctcaggtgatccacctgcccggacctcccaaagtgctggcattacaggcgtgagccactgcacctggctctctttattgttttaaacagaactctaatttttcttcaggccactgatttagtttcttattatacatttatttatttatctgtttcttattgcctgtccccccaactagaccaattgcaaaaaattcaactgcagaaatataaggtaagtttttcatggatgattactcattaactataaatacataaaaattttatgtacacatttatctgagctgccctcatatggccttctacagaatgcttgaagttagattaaaaataatctacagataaatattcactgatagaatgcttaaagttgaagcctactggtgaaaatgttgttcctttctcaccagaaatgaagtagatacatttatttctggacttgctattatgcttcattagtgtgtgtttatttttatccagtgccatgccgtttgcttattgtagctttttttttttttgagacaaggtctcattctgttgcccaggatggagtgcagtggcttgatcatggctcactgtggcctcgacctcacaggatcaaaggatcctcctacctcagtgtctcaagcagctgagactacgggtttgtgccattattccctgctaatttttgtagtttttgtagagatggtgttttgttatgttgcccaggctggtctaaaactcctgggctcaagcaacccaccttggcctcccaaactactgggatcacaggtgtgagccactacacctggccttactgtagctttgtaatatattcagagaccaggtagtgtgatgccgccagctttgttctttttcctcaagattgcttaggctattctgggtctttcatgaattgataaagatttgtgaattactttttaattctgtaaaaaatataattggaatttttataaggattgcattaaatctgtagatcactttgggtagtatggacattttcacaatattaattctttccattcatgagcacggtgtctcatgaattttttagtgtcttcaatttattttattaatgttttagagtttttagtgtatggatcttttacctctttgaataaatttatttatgtgtattttattctttttgatgctgtggtaaatgaaattttaatctcaatccttgtctacacatctattcaactttaacagctttagagtttaaaccaaatacgtgtggcaatgcaggagaggaaagaaacccaaagttttatagttttgtaaaatacaggtgctcaatttagcatcctgtgttatgccctggggtgccaagcatcgcattaagctcaaacttaagctcagattgacttattctttgggataacccaaagatagaggaactcatcatccttattttacataggcagagatggccaggcgctgtgactcaccctgtaatcccagcactttgggaagccgaggcaggtggatcatgaggtcaggagcccgagaccagcctgaccaacatggtgaaaccccgtctctactaaaaatacaaaaattagctgggtgtggtggcgggcgcgtgtaatcccagctactcaggaggctgaggcaggagaattgcttgaacccgggaggtggaggttgtggtgagccgagattgcaccactgcactccagcctgggtgacagagcaagactccatctcaaaaaaaaaaaaaaaaaaaaagtacataggcggagatggctgcatagagagaataaataaatatacacaatcgcatggctggtacatggtaaactggaacttctagtacaggccatctgaccctgaacttcaaatgggctgggaagcttcttaccttctgtctatgaaaagaccagagatgccagagaatgccatttgagtctttggtgaataggtgaaaacttcaaatattgataatcaggaggaaggagttagattgacccactacttgatggaacacttatttttaacttaatgcagccatgaaagtgcttataacacttggggctttaagttcatcaattaaggcagaatttctatatagtatgcttttccctataaaatgtatttagccattgataactctatgtagttctgtggaatatgtgcttattagacagatcaggtgtttcggctaagaataagatgagtaactgtgttttaaaaatatatatttataaataattttaatcttgaatatttaataaccattaactactgtttgaatacgtctttgtccaaaacatatatatgtctatatacattctagataatatataatatgtatatatataatacatacatacatatataatcatatgtaatataactgtaccttctgtggctattatgagcttcattgctcgcaagctccaggatatggggcatcaggtactcaagagtggcagcaggaaacataagcatggaagagtccaggcactgggcacaggagatctcccacaagaggtgtccaaatataccaaggggaaccgtacgtagttctgctcttgctaagagtgtaaagtctgtttttttgttgttgttgttgagatggagtttcactctgtcacccaggctggagtgcagtggcatgatctcagctcactgcaacttctgcctcccgggttcaagcaattctcctcgctcagcctcctgagtaggtgggatgataggcatgcgccaccacgcccagctaatttttgtatttttagtagagacggggtttcactatgttggtcaggctggtcttgaactcctgacctcttaatccacccacctcatctgcacaaagtcctgggattacaggcatgagccactgtgcccggcctgaagtctgctttttatgtctatcagagcttcaaagtcttcttttcctagacatgggcttttgtgaatggtatagtttagatgtagtttgtccctgaaaaagactcatgttgaaatttgatcccctatgtggcagtgttgggaggggggcctcatgtgagattttaggtcataaatagattaatgctctcctgcagagatgagttctcactctcaaagtttccagcaagaatagatttttaaaaatctggctttctcaagtttatctcccttttgcttcacctcttgctatataatctttttgcacatacctgcttcccttctgctttctaccatgagtggaagtaacatgaggtgttggggtgatcagacccaacaccaggtcgtgggggtgacgaagtccgttggagtcaaaggactgagaaaaagacagtttgagagagaaagtgggaccagggggccatcacgagtgtggagactgtgaaggccccaagctctgggagcccatgctatttattggtgccaaacaaacaggtgatgaggatttgggggttgaaaggaaacagtgtatcaagtgaatgagaaacatatggctgcttgagataacgagagtgctagaagcaaggagccagcaagtctagcagacatgcaagccctgcctcagcttctctcccaacactcagcttttctcccaacatgaggctttcaccaaaagccaaacagatgccagctccattcctcttgtgcttcccagcctgaagaaccatgagctaaataaacctctttatacattacccagtctcaggttctcctatatcacaaaaaggactaaaccagtgagctttgcattaatcaacctgattttcaacctggccttggcctctcaagaccccagtgctcagtcacacccactatgtccatgtgggcctgtccttcactcatctttgtaatactctagacttttgaatgccactcatgtcaacttggccatgaactggcctaggcctagaaatgcccatgattagaatctagtcactctaatgactgaaccctctttttaaagaaactctagctattcaattgactttgttgtagaaaaaaatgtgtcatcaataaaatactttgccctgtctagaggacaccactacagattatcacactctagccagtactctctttgagtgcttttacaactttttctaaggtttaggtcactgaaagacattcacaatgtcttgtccagtagagtgtaaattgtttcttctctcacaatacaataatacgagtctccctccatttatatatttatttaaatatttccaatttatattgcttttgctgtatatttgaattttttttgtactggttatcatgtatgctgattcctcagaagttaaataaacattttaatatgtgtgcctatcttttgttgttatttagatatctaggtgactacagcttcagtagaaatttgttgacttcgttttgattttatttgcaattttcctttcggcttatttagtgtttctgtgtttttctgctgcatttacagcatattatctagtctttatcactggcaacagtggcttgaagtttgtttataaaattatgtttattgagatgaaattcacataacatcaaattcaatatcttaattattttcaggtttacagttcagtgtctttttgtgtattcacaatgctttacaatcattagcactaggtaatttttgaacagtgtaattacccaaaaaagaaaccccacacccatcaaaagccactttctattttccccaccggcctctggcaaccactaacccgctttctgtttccaaggatttgcctattttgggcatttgatacaaatggattcataaagtatatgatgctttttgtatagcttttttcttttcttttcttttgagatggattctcacactatcttctgggctggagtgcaatggcacgatctcggctaactgcaacctctgcttcctgggttcaagtgattctgctgcctcaacctcctgagtatctggaattacaggcacacaccacaacacctggctaattttttgtatttttagtaaagacggggtttcactatgttggccagactggtctcaaactcctgacctcatgatccacctgccttagcctcccaaagtgctgggattacaggcgtgagccaccgcacctggccttgtatagtttttttcatcaagcataatgtctttaatatccatccatgttgtgtcccatattagtacatcattcctttttctggctgaatactattgccttgtatactacatcacatttgtcaatctagtcctccatggataggcatttacactggtttcactttttggctataacaaatgtttctatggacatgcatatacaagtttttgtgtggacctattttgatttcagttgagtatatactcagaagtggaattgctaagccatgtggtaactctgtgttaacctcaggaggaactgccaaaatgttttccaaaactgctgcctaattttgccattccaccagcactgtatgaaggtttcaatttccccacatcttcacccacactgatctgtcctctgaaatatacctgtaccagcaggtgtgaggtgatatatcactgtggttttgacttgcatctttctaatgaacaaagatgttgtgcatcttttcatgtgctcattggccacttgtacagaataaaaatcttggagccactggtccagattatgagtctcaaacacatgttacgaacagatttttgatgctgcacaagaaatagcactcagcaaggcaaatttacttctatagaagggttcacctcgtaaattaagcaatggcaagggcgcacagaacaaaggaagcaggagtttttattatctctgacacagcttctacttctgtatctttcccctattggttagggttggaccgcacagtctaaaccagtcccgattggctaaatacttaaaactttttagataaggtagtcacgtaagggaagtaagagagaaagaaggcgggtcacttatggggaaactacaaaagtaacctattccctaataaggaaaggaatgtggactgggactggggttgtaggaagttcacgcatgtctaggcatagttagataagttggggcacaggtgaggtaaggaatatttggaattatagaataaagaatggggaaaatggataaggtatttgaagagtgaacctaactgtatctaacacacaaaacaccatggaatgatgataattcagtacatagtaatcttataattctgttattatctaatgaagaacagcatcccaaatcttttttgtgttgtttttgttgttcgatttgccaatcacatgcatagaaaaaaatggtatttaccagtgtatttacaatccaggacaagatgttggagggcccaatgtatttgggagcttgtagtttcaactgtgcccacctgatgtggctgataataatagttagaagatactcaagagggccgggcatggtggctcatgcccagaatcccagaactttgggaggccaaggcaggtggatcacctgaggtcaagagtttgagaccagcctggccaacatgttgaaaccccgtctgtactaaaaatacaaaaattagctgggcgtggtgtcaagcacctataatcccagctacttgagaggctgaggcaggagaatcacttgaacccaggaggtggaggtggcagtgagccaagatcatgacattgcactccagcctggtgacaagagcaaaactctgtctcaaaaaagaaaaaaaagaagatacctaagaggcaggtggtggcaatacacacacctctgcccactctgtgaacatagaaaacacatttgaatgcaatgtcactgaggaaatgctttaaattaaaaacagtcattgtctgtaaggctgctttggataatatgaccgagatgttggctatagccaggtgcttgagaatcaaatctgtggactttagtatccacctggtgtaacgaaatgcaaaaaaaaaaaaaaccaaacaaacaaataaacaaaattccccaataatcagactgttgtctgagaaaagatcattcctattaccaaatccctggaggccattcattattttccagttactaatattttcattcagagtgagaatattctgcatagacacataaggtctgttttatggtggcaactaaaatggactatttttccacatactattgttttcaacttataactttgtttttaaactccacttttctttcactaagatttttttgattctctctctctttctacacacacacacacacacacacacacacacagatataaacacatacacacacatatagatatttacacattattttcatttagcctgtgcttttaaaaataaatttcagtggttgacacctagttcacatgttgtcaggcattttctattttagtaatttaattttcacctatattatttcattgaaatacatttgaattaaatatgaaactttaatatgaaagattccattggcttttcttgcaaaaaactttaatataaaagatgccattggcttttttattattataaatatatgtagtgtgataacactgtatacatagcactataaaactactgtattagtgtgttacatataatttttataactctatgaagtgctttattattcccattttacaggtgaagagagcttagatacaaatagaataaataacatttctaaaatcacctccttgtaggaggcagtttcaggagttgaagatgtttttaacaatagttaatatatgctgtctcaacatcagatatatattttttaaaaatctacataggccaggcacagtggctcactcctgtaatcccagcaatttgggaggctgaggtgggttgatcacgaggtcaggagatcgagagtggtgaaaccccgtctctgttaaaaatacaaaaactagctgagcatggtggcacgtgcctgtaatcccagctactcaggaggctgaggcaggagaattgcttgaacccaggaggtggaagctgcagtgagccaagccactgcactccagcctgggtgacagagcgagactttgtctaaaaaaataaataaataaataacgacacatattttaaaaacatgtacctcttgttagctttttaaagaatgtttgtacatatttatttaaaaatgcatatgaaaattttacatttaaatatgattgcataatttattggcaaatatctataatgattcaaagattcaagtagaatataaatgttctgatttagcatcatcttaaaataagtggaatttgttgaatgcaaaaatggtttcctcatggaattagaagactttttaacttaaccaagaaggagcacataatggaatggcaattgagaaaagggacttgaaacatgagtagaaggtcaaatattgcatagaaaaactaaattaccataagtatatagagaaaatcagtatttgtgaatgcaaaaatatcaaataaaattatgtcagggaggtgaaagatctctgcaatgagaatcacaaaacactgctgatagggatcagagaaagcacaaagtaatggaaaaccattccatgctcatgaataaaaagaatcaatattgttaaaatggctatactgtccaaaacaatttacagattcaatgctattcctatcaaactaccaatagtattttccccagaattttttctaatatttatataaaaacaacaaagagtctaaatagccaaagtaatcttaagcaaaaagaacgaagctagaggcaccacacttcccaacttcaaactatactacaaagctgcagtaatctaaataacatggtactggtaaaaaatcagacatatagaccagtggaccaggttagagaacccagatataaagccacccacctataactatctgatctttgacaaagttgacaataacaaccaaggggaaagaacttcttattcaataaatggtgctgagataatggactagccatatgcagaagtttgaaactggacctctatctctctccatgtacaaaatccacctaacatttgctacagacttaaatataaaatctaaaactgtaaaatccctaggagaaaacctaggaaatactattctgccaataggtcttggcaaagatttcacgatgatgacacccaaagcaactgcaacaaatagagaaactgacaagtaggacctaattaaacttaagagcttctacacagtgaaagaaactatcaatagagtaaacagacaacctacataatgaaagaaaatatttgcaaactatgcatctgaaaaaggtctaatatccagaatctataaagaaacataaatggccaggtgcagtggctcacacctgtaatccccgcactttgggaggcctaagtgggtgaatcacgtggtcaggagtttcagaccagcctgaccaatatggtgaaacccccgtctttactaaaaatacaaaaaattagctgggcctggtggtgggcacctgtaattccagctactcgggaggctgaggcaggaaaatcacttgaacccaggaggtggaggttgcagtgagccaagattgaacaactgcactccagcccactccagcccgggcgacagtgagagacttcatctcaaaacaaacaaacaaacaaaccataaacaaatcaacaagcgaaatataaacaaccccattaaagaatgaacaaaggacataaacagacacttctcaaaagaagacatatgcacagccaaagagcatatttaaaaaatggtcaacgtcactaattattagagaaaggcaaataaaaaccacaatgtgacaccatctcagtccagtcagagtgtctattattaaaaagccaaaaaacaataaatattgatgaggttgcagggaaaagggagtgtaagttagttcagccactgtggaaagagcaatgtgaagatttctcaaataactttaaatcatctgacccagccatcctgttaccacatatatacccaaagggatataaatcattctactataaagacacgtgcacacatatgttcattgtagcacttttgacagtagcaatgatatgtaatcaatctaggtgcccattaacagtggactgaattagaaaaatgtggcatatgtacaccatggaatacaagtcagccataaaacagaataaaattacgtcctttgcagcaacatggatacagctggaggccattaatataagcaaattaatgcaggaacagaaaacaaaatactggatattctcacttataaatggaagctacacaacgagtacacacgaactcaaagagaaaaacaataaacagcagggtctgcttgagaatagagggtgaggggggtgaggatcaaaaatctacctttctgccaggtatggtggctcacgcctgtaatcccagcactttgggaggctgaggcgggtggatcacctgaggtcaggagctcaagaccagcctggccaccatggtgaaacctcgtctctactaaaaatacaaaaattagctgggtgtggtggcatgcacctgtaatcccagctactcatgaggctgtggctgaagaatcgcttgaacccagaaggcagatgttgcagtgagcagagattgtgccactgccctccagcatgggcaacaagagcgaaactcttgtctcaaaagaaaaaaattaaaaaaaaactacctatcaagtaccatgctcactacttgcctgatgaaataatgtgtacaccaaaccccagtgacatgcaatttacccatttcacaaacctgcacatgcgcccttgatcctaaaatagaagttggaagaaaaacccacaaataaaaaagattcagaactagagtagataaaacaacaatgattttaaaaagagcttttttgcccttctaaaatatgggtgttaatagatgttctggatcttcagcctcatcttggaccatgaagaatggaaaacaaatgtcaggggtgatggagcagagacatccctaaaggcttcctgaggctgccatgctggcccaggtatgcctaactcctgagtttttatgtgaaaaaaatataacttacgtgttttaagtcagtatagatagatctctattattcatagctgaataaagtaaaatgagctgttgaacttgaaaaaaaaatagagatattttgaaaaatttgctccagttacaatttaccaataacaattacagctctttgccgggcatggtggctccctcctgaagcaggtggatcacctgagagtttaagcccagcctgaccaacgtggcaaaacactgtctctactaaaaacacaaaaattatctgggtgtggtggtgcacgcctgtaaacccagctacttgggaggtggagtcaggagaatttcttgaacctgggaggtggagattgcagtgagccaagatcctgctactgcactccagcctgggcgtcagagtgggactccatctcaaaacaaaaacaaaaacaaacaaacaagaaaaacaatgacagccctctagtgtctccagagaaatgaaggagtttggaacagtctcctctcttctatgatttctgaagaaagaaagaggctcacatggagggctcagaaaatgctgagtctgatacatgaaggacagacagtgaagtcagtgtgtctttctggattctgtgcttccttaaaatgttctgctaaaaaggaaattttctgttaatcttcaaattcctgagccaaactagtctttaatatttaatagagaaatgtgctgggcatagtggctcacgcctgtaatcccagcactatggaggctgaggcgggcagatcacctaaggtcaggagtttgagaccaggctgaccaaaatggagaaaccgcgtctctactaaaaacacaaaattagtcgggcgtggtggcacatgcctgtaatcccagctactcgggaggctgaggcaggagaattgcttgaacccgggaggccaaggttgcagtgagccgaggtcacatcattgcactccagcctgggcaacaagagtgaaactccatctcaaaaaaaaaaaaaaaaaaaagaacaaccccactacaataaaggagaaaacaacagcgaatttcatcacctgtaacattgtaacattctagctacccagaagtcctcagtctgtccatgtgacaacttcactgctagaacaacctgcattcacaaaaaccagtgcactaaattgaattacaacaaaggaccctcacagagtccactttactcccctgctacctctaccagagcaggtggtattatccatggctgagaaacctgaagacagatcacatcacaggactctttgcagacaatccccagtaacagcccagagcccagtagctccactggatggttaaacccagaagagcaataacaagcactgcagtctgactctcaagaagccccatcccaagagaaaaggggagaccatcacatcaagggatcaccccatgaaacaaaagaatctgaacagcagcctagagcctcaggtcttacgtctgacatagactacccaaatgagaaggaaccaaaacaaaattctggtgatataaaaaagcaagaatttttttaacaccttcaaaagaccacactagctcactagcagtggatccaaaccaagaagaaatccctgaattgccagagaaagaattcataaattccattattaagctacttaaagagacgccacagaaaggtgaatattaacttaatgaaaaaattttaaaatacgggatatggatgaaaaaagtctccagagaaatagacagcataaataaaaaacaatcacaacttccggaaatgaaaggcacacttaaagaaatgcaaaatatagtggaaaattacaatagaaccaaacaagtgaaagaaagaacttcagaccccaaagagaaggcttttgaatattccaatctaacaaagacaaacaaaacagaatttaaaaatgagctaagtctccaagaagcttagaattatgttaaacaataaaatctaacaataattggtgttcccaaagaagaagagaaatctaaaagtttggaaaatttatttgagggaataattgagaaaaactttcctggccttgctagagatctagacacccaaatacaagaagtccaaagaacaccaaggaaattcatcacaagaagataatcacctaggcacacagtcatcaagttatctgaagtcaatatgaaggaaagatttttaagagttgtgagacaaaagcatctggtaaactataaagaaaaacatatcagattaacagcagatttttcagcagaaaccctaaaaactagaaagaattggggtcctaagtttagcctccttaaacagaacaagtatcagccaaaaattttgtatccagtgaaactaaacttcataaatgaaggaaagatagtctttttcagacaaacaaatgcttagagaattcaccactaccaagccactactataagaactgctataaggagttctaaatcttgaaacaaaacctcaaaatacaatgaaatagaacctccttaaggcataaatctcacaaggcctataaaacaataatacaataaagaaggtattcaggcaacgactagcacaatgaatagaatagtccttcacacctcaatactaacggtgaatgtaaatggcctaaatgatccagttaaaacatacagaatagcaaaatggataagaagacaaatatctgttgtcttcaagagactcacccaacacttaatgactcacttaaggtaaagggttggaaaaagatattccatgcaaatgtaccccaaaagaaagcagtagtagccattcttacatcagacaaaaaagactttaaagcaaaaacagtttttaaaaaaagataaagagggacaaaaaaaaaaactagtccaacaggaaaatatcacaattctaaatatatatgcacctaacactggagctcctaaatttataaaacaattatcactcgacctaagaaattagatagatggtaatacaacaacacaactataatgggtgacttcaatactctactgacaacactagacaagtcatcaagacagaaagtcaacaataacaaaaaaaaatggacttaagctataccctagaacaaatgggcttgacaaatatttacagaatattctacccaacaactgcagaatatacattttattcttcagcacatggaacattcttcaagatagacatatgataggccacaaaacaagtctcaataaatttaagacagcagccataaaaaatgatgagttcatgtcctttgtagggacatggatgaaattggaaatcatcattctcagtaaactatcgcaagaacaaaaaaccaaacaccgcatattctcactcacaggtaggaattgaacaatgagaacacatggacacaggaaagggaacatcacactctggggactgttgtgggatggggggtggggggagggatagctttaggagatatacctaatgctaaatgacgagttaatgggtgcagcatacgagcatggcacatgtatacatatgtaactaacctgcacattgtgcacatgtaccctaaaacttaaagtataataataacaaaataaaaaaaagaaaaaataaataaataaataaataaataaatttaagacaatcaaaatcatatcaactactctctaagactacagtggaataaaattgaaattcaactccaaatgaaccatcaaaaccatgcaaatacatgaaaattaaataaattttggaaattaaataaatacatggatattaaataaaacattaaacttaagttcaacccatttttgaatgattgctggatgaaatcaagacagaaatttaaaaattctttgaactaaagataataatgacacaacctatcaaaacatctgggatacagcaaaagcagtgctaaaaggaaagttcatagcatcaagtgcctacatcaaaaagtctgaaagagcataagtagacaagctaaaataacacctcaaggacctagagaaacaagaacaagccaaacccaaacctagcagaagaaaagaaagaccagaactaaataaaactaaaacaaacaaaaaaaattcaaaagatgaatgaaatgaaaagctagctcttagaaaagataaacaaaattgttaagccattaacagaattaaccaagaaaagaagagagaagatataaataagctccattagaaatgaaagagaaaatattgcaactgatgccacagaaatacaaaagatcacattcaggtctactgtgaacatctttacatgcagaaagtagaaaatctaaaggagatgaataaattcctggtaatgtacagtcctcctagataaaaaaacaacaactctgaacagactaataacaagccagattgaataataatttaacaaattgccaaccaaaaataaaagttcagaaccagatggattcacagctgaattctatcagacattcaaagaaaaattggtgggggtggggcccagatggctgactagaagcagcatcccatagaaaagaaccataatagcatgtaaatcttgcaccagcacctgaggtatccaggttctctcatcagaactgactaggtggctggcatgacccatggagaagaaggaaaagcaatgtggtgtggcaacccacctgacagccaaatggggctggagagcccccaaccccagccaagggaggcggtgagtgagcaggctacccagtctgggaaactgtgctttctccatggaactgtgaaacccatggaccagaagattcaatttgtgaacccacgccactggagcctaaggttccaactgttggaaacaagagcttggagtcacaaagaaaacaagcactcaaacaaggaatttctcagcaaggcaaatttacttctgtagagaggtgctgctcatgtctctggctgttgtgagagcacaccatacaagagagggaaggggtttgtatccctaatgcagtctctacttctgcatcctctcctcattggctggagtcagaccacacactctaactcgattggctattctaaatcaagactggcaggaaggttgtttacagagtaggtaactaggagtgaggaggaattcttccaaataaagaagagatgtgggttacagattgggactggttggaagagttgtttacagagcaggtagctaggagcaggaaggtacaaggaagttgatttccagaacaaagaacaaggaagctatcctttgaagaggaacttattatgcctgacacaaccctggagctgagtagattctcaacagcctctcagctagaatctgcttaagcctgccaagttcccaggggaggggtgaccaacaccacagctgtggctggctgctgtctaagctgtttgagctccttgggggagggacagcagccagcacggggactcacaactgcctaacaggctaagatccttgggtggggaaaggcagcagccatatctatagctcctgaccacacttttcccctgctagagccagggaggctggacagcttggtctcaagaggtgttccccacagcccaacacaccggctgtggctgactgcagccagaatgtctcttcaggcctgaccctcacccatccctcctcactgggcagggcctccctccaagaactccaacagctccagccaggggctcagggacagaactgtgatctccctgggcctgaacccctagcgggagaggtggttgcagtttctgtggaccagcagacttagcctttctttctgctagttctgtggaattcaggcagcccagatgactgggtttccacccatcaaaacacccccctccaccaaggaacagtcaaagtgcttcattaaatgggttctgctccccgtgccacccaactgggtgagacccttcaataggggttgtcggacaccctatacaggagcaatcatactggattcaggttggtgcctcttgacatcagtgatctcagaggaaggagcaggcaccattctttgctgttctccaacctccttgagtgacatctccaggtacaggagtaaaccagatgaatagagcctgaagtgaccccccagcaaactgcagcagccctacagaagagggacctgactattgaaagaaaaacaaacaaacaaacaggaagaaacaacaacagcatcaacaacaaaagcgtacccacaaaaaccccatccaaggctgggcatagtggctcacatctgtaatcccaatactttgggaggctgaggcaggcagattgcttgaggtcaggagctcgagaccaccctgccaatgtagcgaaacccagtctctcctaaaaaatacaaaacttaaacaggtgtggtggtgcatgcctgtagtcccagctattcgagagcctgagacatgagaatcatttgaacctgggaggcagaggttgcattgacccaagactgtgccactgcactccatactgggtgacagagtgagactctgtctcaaaacaaacaaacaaaaaaactcatccaagggtcagctgcctcaaaatgttgaaattagacaaactcatgaagatgagaaagaatcaccaaaaccctctgaaaggccttatctcctagagatgatcacaatgtctcttcagcaaattcacagaactggacagaggatgagatggatgaagtgacagaagtaggcttcagaagatgtgtgataacacactccgctgagctaaaggaacatgttctaacccaatgcaaagaagctaaggaacttgataaaaggtgagaggaaatgctaagtagaataaccagtttagagaggaacataaatgacctgatggagctgaaaaacacagcatgagaacttcatgaagcatacaaaagtatcaatagcctaattgacaggcagaagaaaggctatcagagtttgaagaccaccttgccaaaatgaggcaagcagacaagattaaagaaaaaagaataaaaaggaacaaataaggcctctgagaaatatggtgttctgggcaggaaatgcatgaggggagaagaaaacacacacacaataccattaagggtaaacaagctttatcccacctaaaaggcaatgcagatataataagcaaattgatatcataagcaaattgcaatgggaaagggagaagggaaaatatgtaaataaatgtacaaaaccaaactatgtggtccatagttcaccctatttaaaaatatgtagtcctcataatattccatttaacagcctgttgtaactctttggtgttaagcccaagcacatctaatatatgctggtgccaccaccagaaacgtgtcccatcacaccaccataagtggtgtctctctctgatgttggaagagacagtgccaaggacattttcgctggaggtaggaggtggggtcataaaaggaatagcaaagtaccttgttcaaaaggatcagatatagttacactcatcagactatgggggattcgtcaccacaccaggaagcaacagcctgggctccagagtcggccacccatctgtgcacaaacaaggagaggtctcttgaagccttggtgcagtcttggaccctgtctctttttgtaacaagttgtttggcatgaggcccagtgatgagggccctttgcgactgggctcagggaacacaaaaaggtcaagttgtttttgtgattgtctattgtttttcaataactaacgtataggaatagattgaaatagagattctttctgaaatagcgctggatgaacgcctcaaggggttcacacaacctgtgccaggacttggtgaccattgtttgtgtccatgttcaatttagttcaaatttaatatttaacatgtcctctacattcggcctcaattggatactcaattgtaggaaaatacccttacagatacaaggggaaggcataattgatatagattacagatacagggtaaggacaagagaattaaaagcacaattaataaaaaccacacccaccatggctttgcaaggagagtcatattgtgagaactgccagagatatacacacaacattcagtatgcagtaaggtgcaaacccctccttgggttgcggtaagcatatctaatgccatttgattttgcaacacaacagtactcagatgagcaaattcatctgataacaacataaattcagtgctactatcattaagagctttttctacatgtaaggtaaatcttttaatttgttgctgaagcaagattgtacgggcggcaggggagaatactgtgatagggtaccaccaccagggagtccagtgcattggtaaccagcgatgtttgtaagcatctagattactggggaggggaatattaacctggatggtgaatgtaattaatggccacccccaagtgcatctccccatccaatgcagggacaggtatcaccacccataggatctgcatacccagagggccccccaggggacagcaatggatctactgtaatcatagtgtactaatctcttattaaaataggaaagagattgtggttcattgggggcaatgttgttgatttggagtatgtgttgacaaatgtctgaagaaaccccaaataaacattagaggagccatttaaggtctccagacagagtgggaactgtatggaatccggccaccagcacagcaggttttcagtatattccattccaggattattgggcaggataccaaggcttttgatgcaaggggagggtggagttcatcttttgtctgacttggcaaagatagattgcttagtgtggtgaaaggaagcccaggttggattgcaagtgttgttgttgttgtggccctactggtaacaatatagccattcagaaatgttgtcagggacaattctgcaaggtagcacattccaggcggcctccggcaactcaacatatagccaacattgactgcggttggcttcagttgcagcagtggctaccaagttgatgaatttattcttggcttcagacacaaagacacaggtgctgacgagtagtagatagattatttcttgtaataacaaaaacagaggggaacaagatattgtttttcatctttaggaaattgtactatgccttcatttcctgctttcatagctacaaagtcaccagccttagggtcaggatctgatggacgctgtacccatatttcagctccaggatttaagctacctgtaccaggggatccgaatcccccagttctgtatgtagcctctgttggggcagagatttcctcaggggttgttgacaaggtaccactaacaattgagcaacccacatttgtggttttagagcaaaagaatctggagtgtataaaatgacctttaactctccctggtaatcgctatcaattatagcaccatacattataatgcctctcattgcaaggcttgaacacgttgtaatccattcatccgcattcatgtttaccgttatggtggaaattttggcctgctgttcttcctgctgattaagtagtctgtcaagagaaagcagagactcatgagcatcaatatggaaaacagggccgggtgcggtggctcacgcctgtaatcccagcattttgggaggcccaggtaggtggatcacgaggtcaggagatcgagaccatcctggccaacatggtgaaaccccgtctctactaaaagtacaaaaattagctgggcatggtggtgcgtgcctgtaattccagctacttgggtgactgaggcaggagaattgcttgaaccccggaggcagaggttgcagtgagcgagattgtgccactgcactccagaatggtgacagagctagactccatctcaaaaaaaaaaacaaaaaacaaaacaaaacaaaacaaaaaaccagtgataatggtagtgtgtgctaggattgagatatctccccagtattgttttccccaaacctctttattcccaattaaccatttgctttgttgcctggggcatccaggtagtaagaccatttggtattgaccaagagttggtatagaagtgaaaaatccctctggtctccttctgaatagctcaggggaaccgctactagttcagctaactggctgctcccaccccttccttcatcagaaatgcttttgtttttaataggattataagccacagccttccagcattgattcccaccaatgtatttggtggatgcatcagtaaaccaagcatgtttctgatcctctgggcttagttctttaaaggatttgccccattgggtgggggaggtttccttccctatctgcaggacttgctcggtggtttcctgagctgggagattttgtacatccttatgtaaaagtgatactcactttggttttgacttagcctggtcttgtatgtaccatgtccattttatgatgctactttcttggacatgtcctatctgatgggttttgggggaactcaagtcccaagtcataataggaatttcgggcctcataaagacatcatggttgaagcagaggtgttccatttccagcaaagcccaatagcaagctaacaattgcttctcgaaaggggtataagcttttctggcctctggcagtttctgggtccaaaacctgaaaggtaccctcttcccatcttgtttctaaggctccaattagcctgttgatctaggacagttacttgcagttctcctggcccatcctgtatggaccatagatccagggccagttgcaccgcttgtttatcttgttcagaagccatgctgtctgtctctccccaatgaaagtcatagtgttttctagtggctgcatgcagaggttgtaaaatattactcaagtgaggaatatgatgtctccagaatccagagatgtcaataaatgtctgggcctcctttttagtggtaggggttgcaaattctagtattttagcccctttaccttttgtaagatggactatatctctgcattccataggatgccaaggtattttacagtttgtgcaggtccttgaattttgctaagcttaatttcccatccttgagataggagctgggtttttacctgctccaagccccagcaaagtagttcttcagttttaacctgaccgagtcattctgacagctgctttttttcagcaatagggtgatagctttgagcctgatcagtcaagatataggcctggcattgggccagggccagtctggaaatcacactggcattttccttttccaacttacatttctcttatagcaaccagcccgtatcttgacacattaacttataagcagtaagcaaacaccatccactctgggagatccctcagcatctcctttgctgactggaatctcctgcagcacttcccgcacagtcaaaggtttaaattgcactaatttagattctcagttctcacaaaggccagttccccttgaccattcagttgccaagggggaaaactgggggagttcccatcctgagacatgggaagtccctgagcctccagccccatccttctggccaaaaagcggcatacttttgtttccaaatactgtttgtgacaccaaaaatgttctgtgcaggaaacccgcgaggggagaagaaaagacccacacacaatacttttaagggtaagaagttttataccacgtaaatggcaatgcagatataataaacaaataatataataagcaaatcaatataataagcagattgcagacataataagcaaattgcaatgggaagaggagaatggaaaaggtttacactcaccagactgtatatatttacaccaccagactgggaagaaacaacctgggctccagagtcggccactcatccgcgcacagatgaggagaggtctcatgaagctttggcgctatctgggaccctagctcttttgtaatgagttttttggcatgaggcttagtcatgagggccttttacgaatgggctcaaggaacgcaaaaaggtcaacttgtttttgtgcttgactattgtttttcaataatgaatgtataggaatagattgaattagagatttctctgaaacagcgcgggatgaatgcctcaaggggctcacacaacctgttccaggacttggtgaccattgtttgtgtccagattcaattaagttcaaatttaatatttaactttacctccataccagactatggaggattcaccaccagagtgggcagtaacaggctgggctccagagttggccacccatctgtgaacacatgaagaggaaaaaaaaaaaaaagtgaaaaacattatcccacagtttgcaaaatatattacatttaaacagttgtaaatacatgaacataacatctcagtcataatcaaaattaagtatctgacaacacactcgaaagtttgggagaaatagaaaagtgtttgtgtcttccccaggcccacagttccagtgccctgtgctccctcattgtcatggggttgccatgggccccacaggatatgggaggcacagagcagatggtggctgaaggtggggtgtcttgtgggaccagcttcaagatcagagaccttggttcattgtattgaaatcagccagctcaggaaaagagaccttgctgcctcaagctctatgtccatctgcattagcgatgtaaggaggcttgagcacccatgggcacacaaacccatcccactccaatatttcatcaactattgaggagtctgaatccatgttcttgaggagcatatgcttctgcagttacaaccactatggaaaacagtatggagattccttaaagaactaaaggttatctaccatttgttccagcaatctcagtaatggctatctccccagaggaaaggaagtcattatatgaaaaagacacttgcacatgcatgtttatagcagcactatttgcaattgcaaaaatatggaactagataaaatgcccatcaatattgagtggataaagaaaatgtggtacaggtataccatggaatactactcagccataaaatggaacaaaataatggcattctcagcagcctgggtggagttggagaccattattttaagtaaagtaactcagaaatgataaaccaaacatcatgtattctcatttataagtgggagctaagctatgaggatgcaaaggcataagaatgatacatgaattttcggggaggaaaaatgggagtgggtaagggataaaaggctacacactgggtagtgtttactgctcagatgatgggtgcgtcaaaatctcagaaaccaccactaaagaacttagccatgtaaccaaacaccacccgttcccctaaaacctattgaaattaaaaaaaagaaaaaccatcccaatttctcattttaaaattgggaaactgaggccccaaaagaggctggaaattagagcccctaaataatagaaagccctgtgctctccttctccacatgggctatttttgtctccatattctcagataagcacacacagacacacacacagaaacacttctcagggaaagatcatggaagcgaggatagagaagaggcagacagaaaccaggcataagacaaggaaaaaaaaaaaaacccagaatagtggcagctctgctataagccagtgcatgcactcctctagctacgtgtccaggggcacagagaatgagcaggaggatcctccaggtttccagggttctccatcagctggggtcatctccaggtcagtttcaagaggacaggactggggtcctactgtccaactctgtaggtacctgaaatggaaatgagctatgtccccatctcagcctagcatagacaatggctacagcaaagccttttcatacctcataaataagagtacttgaagtgggtgacctcaatggtttcacatacccataagtgtctgctggcctttgttcttcattggtgaaccaagactctttgctctgagactgcaaaaatgcttctactccctggaagtccttcagagtgaggcatggtcaccccagaggcatcttgggtagataaagctgagatagagcgaaatgtgccatataactggactctgagtctgaagcccagggaaaatactagttcctgttgtgttcttgagatgatcatttggaagtggtagaaaacagtttccctggatgaggggttgtccctcatgagtaaagagcacaccccaaaaggtggaggcaaagagaggacaacggaggcttccaaggttactcttatcgcacttggagcctccggatgctgctcctttgtcccctgggaccctggagagccagtgtcttgaggacccaaacataaaaatagctttgttctgtgaggctcctgcatggggctgcagtgccagtgatggcctctaggtggtgagagccttctgggtttttggtgcccactgagctttgctggagcagctggagcaaagaagtcacaccgaggtcatgcaccttgagttattattaacgatccccatattatcaagtggtcaaaagcaggaaggagaatttgagattcccccatgcattcacttagccagtctttcccttacactcaccctgtgccagctaccctggtggacccaacatgtggtacagaaaatgattgaatcatacctgcaccgtaccctgaggaccagtctgaggacaggtgaccaaaaacactaaagcaagtatacgtgaaagaaaagagcaactgctataatataaagtagaatgttgacagaagagctgggaaatcatgacatggagtgacccaaatgcctcactgagatgacatttataccatgatgacaatgacaatagggagccagcgctgcaaaagaatgtgtcagaagaagccacccttagtaaagaatctcacaggtgtgagttgggcagaagttagaaagggaccactatggccgcagagagcctgagacagagaagcagaaggatggagaatcttggggcctgggagatgaagctagttatctgcttctttcttacaacattgccctgaaacttagcacctttcaacaacaaatactatctcacaatttgtggggaccagaaactggacacagtttagtggggtgcctcttcctcaaggtctttaggaggcttaggcctcataagaagctggacttctcaacagaagctggactggggaaggatcagctttaaactcactcatgtggaaattggcaagactttgtgtggcctgagagcccacgtttcttccatctattggcctgagcactccctcagttctttttatgtgggtctgtacatagagcatctcgtagcattggaatttgccttttcagtttgaggaatacagtacagaaatagataattaaacagaaaaacacaaaaagagagactgagggagcaagtaggaagaaaatgacagcttttagaaaaatatatatataatcttgagagttatgatttctccccctatatttgcgtgaaaattctaaccctcagagtaatggtactatgaggtggggcatcattaagtcctgaaggtggggtcctcatgattgggattactggctttaaaaaagataccccagggggctctctccctccttctgccagatgataaaacccgaagtgtgcagtctgcaattcaggagagtcatcaccagagctcagccatgctgacaccctgatcccacatttccaacccctacaagtgtgagaaattaagttctgttgtttataagcttcctagtccatggttctttggtatggcagcctgaactgcgacaaaaatgataccctatcattctgtactccattggacagaagctgaatttttgtccccaaagtgttgaaacaaaacaaaacaaaacctatgactaaaataagttgggttttcctaatgacaagaaacaacttgttgaaacactgaaatttcctttgcttaagagattttttaaaaatgggctgaagttggttggaactaatatggccatctgaagcctgtgaataataagcttgctgatgtcaggacccaaattatcattgcatgtttctttttcttttctttcttttttttttttcttgagacggagtctcgctgttgcccaggctagagtgcaatggcacgatctcggctcactgcaacctctgtctcctgggctccagtgattctcctgcctcagccttctgagtagctgaagttacaggtgcacaccaccatacctggttaacttttgtattcttagtagagatggggtttcaccatgttggacaggctggtatcgaactcctggcctcaagcaacccgcctgcctcggcctcccaattgctggggttacaggcttgagccactgcacccagcctacaccataatttttatatgttttgtcttatatacacctgataaattccctaggaggtagatgctagcataatccccactgtgtatggtaggaggctggggaagcccgaaaatagacaatggcttttactgagtcacagaaatggtaagataaacaaggttctgacccagctgtctcttctattataaaaccaaggctgcatttaggtcttcccagggaattaaggggaaggtgtgatttcataattacatacaaatggaggcctgacatgggagaggaggctgagtaatcagtagcctggcggggcctctggataggtcttatagtaagaaggggcccagtggaaggaaccttgaagagtctaacatacttccttggtgatggaacccaacagaacttaggaaaccaggaccccacctcctagagacaactctgtatccagcttctttggtgagagatgctcaagagagtaacatgctcttccatggtattcttacatttctgagttttagccttacaaaggctcaaagtaaaagccttctccgataatgcagatgtccacttagccctcatttctaatgaggtgcacccacagataacagggcaacccagaacagatccaggccagtcctctcttgtcgtttcatctagacagccccacaccaccccccactgccatgtattgcaggggcatcaagaggtgagggcattcttcctggacagaaccaggttgtcaaatgttgaaactcttgtgggtctgtcattttcatacccaggtcatggctggcaaaatggggacgaagtttatctactcagatgtgaatcccaagactttaagctgtcctctggtttccttcctggctgaagatctatgcagatgttcctatgtgcctgatctgaagagcaaaacttcaatagaggagtcatctatggtaaaaacaaggcaggcaatcaatcttttttagcttggctgctgggcactgtttacagagccgcattcagattaatgaggagctgtttgatgagtctaactcctccatctctttggaaaaagagcaggtgccctacaccactaaccttggccagcactgggctgtggtgagagcaggcacctagaggtctctatagctaggaacctgagaagaccaggacaggcccaggtcccagactgaaatatggaaactctctgacctctgtcctagggccttcccaggagtgactcatagtcctgtttcaatacaatctggccttcattcgtcccagtggcaacttggttaggtggaaagtctctgttcacatacttgtagaaatattagaggaaaggctttcatcttgttttcactttacatcaagccatgagcatttttgcatgttgctacagtttgtattgttttaactccccaccccaggcatctcctgtggcatgcagcttcagtcctacagaacttctccaaaacttaaaagccaacactatgactagggaagtttttatgcaaaaatgggggaatgtgctgtaccaaaaaagggggtgagactactttacgcatgttcctgcaatgtgtcatctcaagaactgatccccatatcccatcagggaaggaggtgtgcatgcacatgtctttataatattccataagtgaggctcttccccaccgtggttcagtctttcagtgctgatgcagcctggtataacatcctatttccatgtcagtcatgctgcagggaatattgtgtgtgtgtactaataggctgtaatcgtttgctaggactgccataacacagcatcacagaatgaagggccttaaaaacagcaatttagtttcttacagttctggaaattagaaatctaacagatgttggtggaatgacttctccaagcctctctccttggcttgtagatggctgtcttctaactctgtgttaacagaatcttctcttgtgcttctgtctttactacctcttcttataagaacccattatatttaattaggtcccatgccaatgaactcacaagcttaattacctctttaatgaccctgtgtccaaatacattcacaatctgaagcaatgctctttttgcctttgtaaaggaagtttgtctgtggcaaatgaataaatggcagaattttacatcatggggtcagtacaaaaaagggaggtgtgcaggggatttaggccactttccttatgttgggaactctaatgtcaccatctgaagggccacttatgaacagaagagttattatagttattatttcttttttattttttaaggtggagtctctgttgcccaggctggagtgcagtggtgtgatcttggctcactgcaacttctgcctcccaggttcaagcgattcccctgcctcaacctcccgagtagctgggactacaggcgtgtgccaccacccctggctaattttttttttttttttttgtattttagtagagacagggtttcaccatgttgaccaggatggtcttgatctcctgacctcatgatccgcccgccttggactcccaaggcaattcttttagccgatctttgtccttcacacagacataacagaggtccctgggtgctgaaagacgggcctcaggcccacttagatattttggaaggctgtggttaggctccattcactaaatacacgtatattaagcacttaacttgcgcagtcccttttgtagctgcttggcataattcaatgaagaaagcagataatcacagggcctcaattctatctgaagagttaaacacagtaaatattaacaggatgtccactgaatattaaatggtgatgtcctcacggcaattttaatctcctggagccaccaactcactccaattggaacactaattatggagtgtgtattacacatggtagtgcttttctgtgtttgttcacttcatttatgactaaacaacaccatgtctgatgtagagacgtaagagttgataaaaaaagaaacaaacactaccatgactgatgacatctccctagtgttcacctaaagaaattaacccaataagatcaataaactcaatgttaattataaaaattaaaagaacaacaaggccaggcgcaatggctcacgcctgtaatcccagcactttgggaggctgaggcgggcggatcacgaggtcaggaaatggagaccatcctggctaacacggtgaaaccccgtctctactaaaaatacaaaagaatgagccgggcgtggtggtgggcgcctgtagtcccagctactcgggaggctgaggcaggagaatggcgtgcacccgggaggcggagcttgcagtgagccgagatcgcaccactgcactccagcgtgggcgacagagcaagactccgtctcaaaaaaaaaaaaaaaaaaaaaaaaaaaaaattaaaagagcaacaaaggaaagattggcttagagttctccaattgaaaaaaaatgtactaaataaaatgttacaacatatttactatgaaattacatgttcaaattattttgcaagcaccattaaattttgtaaaaattattccaataattcccgagcagattatataaagaatactttataaactttggaacaagaaaactggccgggcatggtggctcatgcctgtaatcctagcactttgggaggctgaggcgggtggatcacaaggtcaggagatcgagaccatccaggctaacatggtgaaaccccgtctctactaaaaatacaaaaaaattagctgggcgtggtggtgggcacctgtagtcccagctactggggaggctgaggcaggagaatggcgtgaacctgggaggtggagcttgcagtgagcagagattgcaccactgcactccagcctgggtgacagagcaagactccgtctcaaaaaaaaaaaaaagaaaattatgcattaggtctactatcaataccaggcaagtaaaacctagatttacttaaggagattctgaactaggaaccacaagattttgaaaaaatgaattcaatacaaatgggaaaaatagatttgctttgaaattgtttgaggtttccagtttggtagtaacttatcaacactttaaaaattaccagtttgttctaacatattttctttcttctcaaaataggtacacatccacattcaaatacaattacttgcttcataattcccttacactttatctttagagtaacatatttgtatattaaactttcatgtaagtgaaaacttaaagagtctatgtgtgtctggaaggccacagaggttgcatgttcaaagaaaaatgtgagataacatcttctacatactcacttaagattcagaaatatatggcttttgattatatgcctgtgtaattttcataataatcatcttaatgactctataattagaagaaaaataataaaaatgtaacctatggaaacaatattctccaacgtatttgaagtttaaagtcactaaggataagaatcactagagatgccattccactatattactgaatagtatgttgttaccgtctgttacctagagacttgagtaaggtaaaataggttaatgttggtggcaggataacacctaattcaatgcacaactgtcttaacacattaaaaataattgttttattgaaactaagttcacacagtctaagaaaagcattacaaaatccactatactatctaatgtgcaattggtaaaacaatttactaaaatttgaataatgcacaagactattactctgaacatctatctcatgcagcacttacaagttttataagtcaaccacaaaagtttctctgtgtactttcttcacacacctcatatttcagtgtcctcaatcttctgttgaaaagtatgtaaatgacatcctaatatagaacttctcaaaccccgagcagcagaaattgaccacatgctttcatacagacactaggaataaagacacagcatcaagtaatttgagagttcaattacatcaaaatttgcctttgtaaaaatctaaaattctttcaatgcaaaaagtgtactttgaatataattgtttaagtctcaaaatattaatctcctatttctgtttaggctaactaaattatgttaaccttgaattactctttataatcaatgccctgatttagaataacattgaaagtgttagcgtcttagtggtttctactgtgaatcttctgatgttcatttagacttaattttttattaattttttatatttactgcatctgttaaatgctttcatataaactagcgttctttctttttttttgagacagagtctctgtcgcccaggttggagttcagtggcgcgatctcggctcactgcaagctccgcctctcgggttcacgccattctcctgcctcagcctctcccagtagctgggactacaggcacccgacaacatgcccagctaattttttgtatttttagtagagacagggtttcatcgtggtctcgatctcctgacctcgtgatccgcctgcctcggcctcccaaagtgctgggattataagtgtgagccaccgcgcccggccttaaactagtgttttctaaggtgtactttttaaacaatttttttcatattcattacagttgtagggtttctttccaatgtaaattatctaaaatggaataaaatttgagcaactgttagagggttacctttcagtataaattctcctatgtacaacaaaatctgtaacataagtaaaagtattgcaacaatctttatatttgtaatgtttttcttcagtataaaaactcttgtgtactctaaggcttatatttttgaagtctttccatgtacaaatgtaatgtatcactatcattacaccttgtgtactctaaggcttttatttggtgacatctttccacagataaatgtaatgtgtatcattacacttacattgcttttatctagcacaaaacctctgatgagtaagttcatagtagttattaaatgctttgccacattctttaaaatcagaatttttctcagcatgaattttcttctgtgcaataagctgtcagcaatggttgaagactttccccacattcttcacatttgtagtgtttctctccagtatgaattatcttgtgatttcaatgccttgagcaagatttatggaatttgccacattctttacatttgtaggatttctctttagtaaaaattcttacgtagtaaggtttgagcagtgattaaaagcttccccacattttttatacttgcaggatttctctcctctttgaactctcttatgttcattaagatgtgagcaccgtttaaaagctttgccacattcttcacatttatagcgtttgacggcagtatgaattttcttatgtctagtaaggtgtgagcaccgattaaaggcttttccacattcttcacagttgtagggtttctctccagtatgaattctcttatgttcagtaaggattgaggaccagttaaaagctttgccacattcttcacatttgtagggtttctctccagtgtgaattctcttgtgtttagtaaggtatgagaacctcttaaagactttgtcacatttttcacatttgtagggtttctctccgctatgaattaccttatgttcagtaagaattgatgatgagttaaaagctttgccacattcttcacatttatagggtttctctcccgtatgggttctctcatgtatagtaagtagtgagcagtggttaaaggctttcccacattctttacatttgtagggtttctttccagtgtgaattgtcttatgtttggtgagatgtgagtgccggttaaacgctctgccacagtcttcacatgtatagggtttttctcctgtatgaattttcttatgtctaacaaagggtgaacaccagtgaaaggcttttccacattcttcacatttgtagggtttctcaccagtatggattctcttatgtttagtaagactcgagcaccagttaaaagctttgccacattcttcacatttgtatggtttctctccagtgtgaattctcttatgtttagtaaggtatgagaaccacttaaaggttttgccacattcctcacatatgcagagtttctcttcagtgtgaattatcttatgataagaaaggcctgagtgagatttaaagactttgccacattgcatacatttgaaaagtttctctgtagtatgtcttatgttttctctatttagatttgatgatttactaaagactttcacacatttattatatgggaaaattttgctaggtagagttgacaaacattggttaagtccattataaatttctttttgatccttacactcacccacattttccccatccttccttaagtgtaaatcctcaagtccacagcttccatatcttctcagtatcactttttggaatgaatcttgcatgcactgttctggcaaaaggtcttcagtgtaatgagaagacatagctgaaatatgaaattaacaaaatatcccacttgttattttcagactcagatacatatactttacaaatctaatacagaaaattaagaaaaggacaggatgacttactagatgcagctgggaaacactcactccaaggagagaaaacaaaatgttgagtaaaacatcatactttaaacagatcttttgagaaaaagcttaattcagaggtaatgcagaaactgtggttgaagaggaagatgggaagcttgctcaaagtcactgggcaccaggactggctcgtagatccagaccagtcttatggaagggatatgtgaagaaaccccagggcaacacagtctagccatggacctctgagattctcactttggttccttctccttgaaaggcatttcccagctaaatctagtctgagctcctgattatagactctcatatgatccctatacatctgtgaactggcagggggagccacctggagaataggcagaggcacagcttaaactcttgtggaaatctgcagttttcactgtgctgtgcagctgtagctgaccataggtgcccatcctccgaggctctgcatcttgcactgaggggatccatctgctgctgtctgccaggctgagagagagcaaggttgtagctatcatgggactgaggtgaatctgatccatgcaccactttgcctgctggcaccgtccaagatgacctacctggctggtcctgcagaagggtgcccacagcatggcatccacttatatcacagatggtgcttgaccccaaagggccagaggacaaatccatgggcccagtgccaactgcccaggtcttcagcacactgcctgataatatcaagctgatatatgtggtctgagcttaagtggggtagaagcccacactgtcagcacacagagaagtcatgggatcatgagccagcatgggagctgagttccccttcattcacatgaataaactgggaagggtgtggccagatgaccagtcatggtttccatcccaggaagcctagcagcatagaacatctggaagaactcagcaatttcaatgcagatggcttgggacaagcctagccaattcagcctgctcccagggaagacactggagacagacctgctgagttgggggaccacaagctgggtgggccccacaactacctgctggactaaaaatcctgggctgcaggtgcaatactggttgcaaacccatggtgcaattgccctgcctggtgttccatcctcgagccatggcatcaccaaacgactcacagacacattccataacccatccttacttttgcaagcaaaggagaacagcaggacccctgataaatatgggtctcctggtgacctaaaagtgtgaactgtccctaaggaagggtaagcacagaccaccaaagccctccttggagcaaaggaattgggtgcagtgccagcagttgaagggaatatcaccaaggccccaaaataaatttggaaagaaaataatctctcacacactatcttccctccccagagcactcttaagtgccatctacttggactgaagcctgaattacaccaccaaacaagaatacattgcttcaacatgaagcactctatgaaatccactgcaggaacttatctacaaccaagggacctagacagaacctctgccctctgaaaacaaccttaaatgacaccaactgattatacacaacatacaccacagccaaaccctcaaggaaaaaaagaaataaaaaaattttaacaccccatccaaatgacagaaaattcaaaaggaaaagaagcaccagctccctcagatgtgaaagcgaaagaaagctggcaatacagaaagccagagtgtttcgttacctcaaaaggatctcactagttcctttgaaagaaccaaacacaactttaaaagttgaaaattttactacaggactttcaaaatacaattgaaagccttaaaaacagaatagactaagcagatgaaagtatttcagagctcagagactgctcctttatatcaacccagtcagaagatagtaaagaaaaaagaattcactacaaaaaaacaaagcttctgagaaatatggaattatgtaaaggggtcaaacttatgactcattagtattcctgagagagaaggaaaaaaagtaaccaacttggaaaacatacgtaaggatataatctacgaaaaattttcccatcttgctagagaggttgacacagagatacaagaaattcaaggaactcctttgagatactatacaagacaaccatcctcaaggcacatagtattcagactttccaaggtcaacatgaaatacaaaaataaaaggcaactagagaaaagggccatattacctaaaaaatgaattctatcaaacagtggacctccccacagaaaccttacaatctggaagatattaggggcctgtttttaacatttttaaagaaagaggccaggtgcagtggctcacgtctgtaatccgagctttttgggaggccaaggtgggcagatcacctgagttcaggagttcaagaccaccctgggcatcatggtgaaagcctgcctctattaaatacaaaacattagcctggcatggtagcgtgcacctgtagtcctagctactcaggaggctgaggcacgagaattgcttgagccctggaggcagaggttgcagtgagctgagattgcaccactgcactccaggctgggccacagagcgagactccatctcaacaacaacaaaaaaagagattaaaaaaaaaaaagaaattccaatcaggaattttatgttccagcaaactaagtttcataagcaaaggaggaataaaatatttctcagacaagcaaccactaggtgaattaactaccactagactggcatcacaaggtgcttaagagtgttccaaatatggaaatggaagaatgatacctactaccacaaaaacacacataagtacatagcccacagaccctacaaagcaactgtacaatcaagactacagagtgcatgaagggaacaaaaactaagatatcaatattaaccttgaacacagcagtctaaatgctccacttaaaagacacaaagtggtggccaggcacagtggctcatgcttgtaatcccagcgctttgggaggctgaggcaggtggatcacctgaggtcaggagtttgagaccagcccagccaacatggtgaaaccccgtctctactaaaatacaaaaattagccaggagtggtggcacattcctgtagtcccaggtactcgggaggctgaggcaggagaatcacttgaacctgggagtcagaggtttcagtaagctgatatcgcgcctgcactccagcccgggtgacagatcgagactctgtctcaaaaaatatattaaaaaatttaaaaaactggccagtgcggtggctcacccctgtaatcctagcactttgggagactgaggcgggcagatcaccaggtcaagagatcaagaccatcctggtcaacatggtgaaaccctgtctctaataaaaatacaaaaattagctggacgtggtggtgtgcacgtgtagtcccagctactagggaggctgaggcaggagaattgcttgaatccaggaggcagaggttgcagtaagccgagatcgtgccacttcactccagcctgccaacagagcgagactgtctcaaaaaagaaaaaaaaatttttttaattaaaaaaaaagacacaaagtggcaaatcagatttaaaaaaaaccaagacttaaccttctgctgacttcgagaaactcacctcacgtataatgacacccataaactcaaagtaaagggaaaaagtaacatctatcacacaaatgggaaaaaaacaaacaaaaaaatgcagtggtcactattcttgtattaataaaacagattttaaaccaacaacagtaaaaaagacaaacacattacataataataaaggattcaataaataaatagataaatcaacgatatttaactatcctaaatatgtatgcactcaacattggcacacccatgtttataaagcaattattactggacctaaaaaaaagacttagccagccacacaataatagcggaagacaacaccttacagatagcattacagatcatcaaggcagaaaactaacaaagaaattctggacttaaactcagcacttgaccatagacatctacagaataattcatctaatgaagacacacatacattctcatctgcgcacagaatatactttaagattgaccacatgctcagtcaaaacagatttcaaaaattcagaaaaattgaaatcatcttcttgaaacagagtgaaataaactcaaaactcaatagcaagaggaaccctcaaaactacacaaatatagaaaattaaacttgttcctgaatgacttttgggtaaacaatgaaattaaggcagaaatcagaaacttatttgaaacaaataaaaatggtgacgaggccaggcgtggtggctcatgtctgcaatcccagcactttgggaggccgaggcaggcggatcacgagatcagaggttcaagaccagcctggccaacatagtgaaaccccatgtctactaaaaatataagaaattagccgggcgtggtggcaggcgcctgtaatcctagctacctgggagagtgaggcaggagaatcacttgaacccaggaggcagaggttgcagtgagcggagattgcgccactgcactccagcctgggtgacagagtgagactccatctcaaaataaaaaaaaaacagtgacaaaatgtaacaaaaccttggaatgtggcaaaagcagtgttaggagggtttatagtgctaaacttttatatcaagaagatagatctcaagttaacaacctgataccatgcataaagaaatgagaaaaacgagaacaaagtaaatccaaagctagaagaagaaaagaaataattcaaatcagagcagaacaaaataatattgaaaccaagaaaaccattcaattaatcaaaaaaataaatttttctgaaagataaacaagatcactagatcactagctaagttaacaaagaaaaaaaaggatccaataagcacaatcaaaaatgacaaactatcaatagactaaacagacaacctattgggagaaagtatttgtagactatgcatctgacaaggaactaatgttcacaatctataataaatttaaatcaagccaggtgtggtggctcacgcctgtaatcccagcactttgggaggccgaggcgggtggatcacgaggtcaggagatcaagaccatcctggctaacacggtgaaaccccgtttctactaaaaaatacaaaaaattagtggggcatggtggcgggcgcctgtagtctcagctgctcgggaggctgaggcaggagaatggcacgaacccgggaggcggagcttgcagtgaaccgagatcgcgccactgcactccagcctgggcgacagagcaagactccgtctcaaaaaaaaaaaaaaaaaaagaaatttaaatcaacaagaaaaacagaaataattcattaaaaagtggtcaaaggacatggtcatttctcaaaagacataaaagcagccaagaaacatgaaaaaatgagataaaaagggagaaaaagaaggacaaacagcaacaaaaatcaaaacaataaaatggcaatagtaaccccttctctatcagaaaattaaaattcatggttcatggaataaacttcccaatcgaaagacataaactggtgtaaaaacaagattcaactacattctttttacaagatactcactttcaatctgaagaagacaatagactaaaagaagaatggtacaagtcattctattagaatgttaaccaaatgagaagaaactaggtcaaaattacataaggcaaactacattttaggtcaaaccctgttataaaatatactgtagtcaaaattctcacaagagacaaagaaggacattatataataataaaaagattaatttatatatgttatagaaaactataacatatatattatcatcagggttcccaaatatataaagtaaacattaacaaaattgaagaaatacacagcaatataataatagtaagatatttcaatatcccactttcagtaataagttataaagcaaggtggaatattaaatataagaacagaggacttcaaagcactctaaaaattacacctaatggacatatagcagaatacacagtcttctccatagctcataacacattctcttggatataccacttgttagggcacaaagccattcttagcaaacttttttttttttaattttgagactgagtttcgctcttgttgcccaggctggagcgcagtggcgcgatctgggctcaccacaacctccatctcttgggttcaagcgattctcctgcctcagcttccctagtagctgggattacaggcatgtgccaccacatccagctaattttgtattgttagtagagatggggtctctccatgttggtcaggctggtctcaaactcccgacttcaggtgatccgcctgcatcggcctcccaaagtgctgggattgcaggtgtgagccaccatgcctggcctagcaaacttttaaaaatggaaatcttatagactattattatgaccaaaatggaatgaaactaaaaattagtaatagaaaaaaatccacaaatatatggaaattaaacacattcttaagcatgctcgtgttcaaggatttgaagaattaatactgtacaacatctttacagtgcccaaagtaatgttcagattcaatgcaatccccttcaaattcccaatttcattttttgcaggaataaaaaagcaatgcccaaatcaaataaaatctcaagagaccatgaagagctaaataatctttaaaataaagaaaggtgttggaagcatcacacttcctgatttcaaaacacatgacaaaactacagtaataaatgcagtttagtactagcataaaggcagacaattagaccaatgaaaaagaatgtagcacagatattatctttcatgtatatggtcaaatagttacttgcacacccatattaattgtagcattattcacaaaaatcaataggtgaaagaaacccaaacttctctcaccaaatgaatagaaaaatacaatttataatatacaaataatggaataatactcagcttttaaaaagcagaaaattgggtcggacgtgtaggttcatgcctgtaatcccaggactttgggaggcccaggtgggcggatcatgaagttaggagatccagaccatcctggccaacatggtgaaacctcgtctctactagaatacaaaaaaaaaaaaaaaattagccaggcgtggtggcacgtgcctgtagtcccagctactcaggaggctgaggcaggggaatcgcttgaacctgggaggcggaggttgaagtgagccgagattgcgccactgcattccagcctggcaacagagcgagactccatctcaaaaaaaaaaaaaaaagcaggaaatcttctaacatgtacgataaagagaaatctgatggcatgatgctaagtaaaataagccagccataaaaagacaggattgtataaatccatttaaatgagacatctaaagtagttacactcagaaacaaaatagagaggtgtttgtaaagggtcagtcaagggggaaaatgagtagtttcgtgtatgttgagtttgagtttcccaagataaaaacatgtggagatacactgcacgacaatgtcaatatacccaatacaacagaactgtgtaactgaaaatatttaagattctaaattttatgttatgtattttgcacaattaaaaataaacaattacacctaaaataaagttataaagcttttcaaaaattaccttcaaatcacaagtgtttctctcacaaaaagaaaatatacatccaccaatgaatagatgttgaatttacaacaattctcatgactcctcatctaaacaggataaaaccatcactgatgaccaacaaaaatgtaaatataagagtcacaaacaaaatggggtaaaacctattcagtcaaacacagagataattaaattggtaataaacatatggctgattcatatctgacttttgcctcacactgtcttaaaatgtacagagctgaatactgtcatacaaaattataatatatgaataaaaactaaaaaatataatgaatgtcaaatggcctattataaaaactgtaacaaataaatataaaattgcaaagcaaaattaaaagaaactataacccataaaattctgaataaacatagtggagtactgatgaagaattcttctagatagctacaattttcaaccatgactggctatccataaaaagcatacatttttgaatcaagagcatacagttagagcattaatatttcacagaaaccccattataattattcataaaaagctttgagaaaataatttttaagaaataagcacttacataatactagggaaacttattaatatgttgctcttctttttacacaaaatggtaaggctgtaatctagcctgcagaagcaaagaaaagacttacatcttttactgtaagaacaatataaatattgtaaaatacggtataaaacactgattatgaattaggaataaattatgctatcattcagataaacgttgaggaatatagatgaaaatgcaaagaaagctttttacgtgcaggcaacttaattatacaaactaagccgggcatggtggctcaagcctgtaaccctagcactttgggaagctgaggcgggtggatcgcttgagctcaggagttcaacaccagcctggacaacatggtgaaactccatctttagaaagaatacaaaaattagccaggcgtggtagcactcgcctgtactgtcagctacttggggggctgagtcagtctatagagccagtctataaatatttattttataaatttccaaatgtcatccagagatcacagggcatagagagaagacaggaaatatattcctttaaaggaataaaatgattcttcggaaatcaatttttgagaaatgaagatccttgtattatctgacagggaattcaaaataatcattttaaacatgttcaatgagcaaaaatagaatgtagacaactaaacagaatcaagaaaatagtgcatgaggaaatgatatatcaacagagatttaaaaaactattaaaagtattttttaaaaaaacaaaaattgtggaactgaatacaataactaagttaaaaaaattattacagagccacaacagataacttaatgaggtaatagatggtatcagcaaattaaagacatttcacttataaatattgagtcataaaagcaaaataatactgccaacaaagaaaattttacctggaaaaatttacctctagaataaggataaaaaataaagactttataaggtaaacaaaagctgtcagtctttgtcaccatgtgtatagttctataagaaatggtaaagtaaatatatacacagatctacaattctctactataataataatgcataaaactgaaaatcttgccatagaatttaataaaccaaaacacaaatttgcataaatctgttaatagatacgcaatacgaaatgatataatgtgacactaataacaaaggatgtaaaaaggtatagttttatattcaactgaagtaaagatgagatttaagcatattgttatgtttcataaactctcatttttcaaggtgatcacaaaaatacctatagaagatatgcaaaagaaaatgaaaaaggaatcaaagtatgccactacaaaattaacaaaacaaaaacaaaggcagtaagagaggaaatgagggaaaacgtatttatgacaagcacagaacgtaatcgaaaacaaaacgcaactagtaattttatttctttctggtattattttaaatatgaacagattgaaccctttaaaaaagtaaaatagctgaatgagttaaaaacaaaatcttacaatatgcgtctttaggggactcattttagttttaaggagacaaacaggctgaaagtgacaggatacaaaaatatattccatgcaaacagtaagctcaagtgggtggggtggccatagttagacaaaatccactttaagtaaaaaattgttacaaaagataaagattggtattatataatggcaaaatggatccatttaccgggaatctataacacatataactgttatataactataacacatagcactctcaaatatataaaacaaatattgacagaaggtaagcaagaaatacacagcagcacaataattatagatttcacggcctcattctcaatcatgaatataaaaaaaccagatagatcaataagaaaataaaaaacttaaaacattacagaccaattagacctaagagacacatacagaacgttccagttaaaagcagcagaatacatgatattctcaattacacacagagcattctgttaggacacataacaagtcttaataaatttaaggagactgaaatcatacagtgtatattttctgaccaaaatggaatgaaactagaaatcagaagcagaagtaaaaccgtaaatccaaaaaatgtggaaattaaacccactcaaacatattcttgctcaaggatcagataatttcattttgttaagatgtcaacatgcacagccacgtacaaattcaatgtaatatctatcaaaatctccatggtagtttttattttttttttttgcagaaatatagttaagattctcaaattctttttttttttttttttttttttttttttttttgagacggagtctcgctctgtcgcccaggctggagtgcagtggcgggatctcggctcactgcaagctccgcctcccgggttcacgccattctcccgcctcagcctcccaagtagctgggactacaggcgcccgccactacgcccggctaattttttgtatttttagtagagacggggtttcaccgtttttagccgggatggtctcgatctcctgacctcgtgatccgcccgcctcggcctcccaaagtgctgggattacaggcgtgagccaccgcgcccagcctctcaaattcttttaggagctataactagcaaaacaccctttaaaaagaacaacaaagaggtattacacttcctggttttataacacattacccaaagctataaagatagaaataatgtggtattagcacaaagaaaaataaatggatgataaaacaaaatagctcagaattaagcacgtgtgtacataatcaaataaccttacataagattgctatggccacacaatggggaagaaaacagttttttcaacaaatgatgttgaaaactgagtatctacatgaaaaaaataaagttgagcccttccgttacatgcaccatataaaaacagtatttaaaatggattaaatacttgaacataaaaatataacaaacttcctagataagtatatgggggaaaatatgacattggacttggcactaatttcttgttacaaaagaccaagaatttgatgtcattttcttagctctgaaatcaaatgcataaggaacaaataatagagaaatgggactacatcaaacttcagaatttctgcacatcaaaggaaaaatttagtggggtgaaaatgtcacctaagaaatgggtgaaatatttgaaaatcacatatttgataggagttaattttcacaatatataaacaatgtctaaaactcaacaaaaagtgagttacttgattaagaaacagacaaataattgaactgacatctctccgaagaagttacataaatagcctataagcatttgaaaggatgctcaagattgctaacttttagaccaacacaaagtaaaatcacagtaaaatattacctcaaacccattaggagagccattaacaactgtaaccacccccccaaaaaaaagtgttacggatatggaaaattgagaggccttttgagccactggtaggcaaaaatgatgcaactactgtaaaaaacatactatgaaggtttttcaaaatattaaaaatggaattactatataatccagcaaacatggaaaatcctatttgatactgttcttggcagttattttttgaggtatgacaccaaaagcacagcaacaaaagcaaatataaataagtgggactgcatcaaactgaaaattttctgcacagcaaagaaaataatagaaggaaacttacaggatagaaaaaaatatttgcaagccatacgcctgataagaagttaatatccagaatatataaggaactcatacaaatcaaaggcaaaaacaataataagaatgataataagaacaaaactgaaaaacagactgaatggatagatatttttccagtgaagacaaagagccaacaggtatgagaaaaggacctcaacatcaccagtcatcaggcaggtgcaaaccaaaacaatgataaaatatcacttcacatttgttaggatgtctattatcaagagacacttatattttttgggtgatgtataccctaaaagcactgacttcaccaccatgcaatctatctgtgtaacaaggttgcacttgtaccccacaaattcatacaaacaaaaagaatagggctgggtatggtggctcatgcccgtaatcccagcattttgggaatctgaggtaagaggactgcttgagcccaggagttcaaggccagccctagcaacacagtgagaccccttctcttaaaaaaaaaaaaaaaagaaagaaattttaagcataaaaacatttttaaaaagagataacaagtgttgacaagtttctgaagaaaaaaatcttgtacactgttggtgtgttgtaaactggtagagtcattatgaaaaccagtatggacgttctttaaaaaataaaattaggccaagcacagtggctcacacccgtaataccagcactgtgggaggctgaggcaggcggatcacgaggtcaggagttcgagaccagcctggccaacatggtgaaaccctgtctctactaaaaaatacaaaaattagctgggcgtggtgacaggcacctgtaatccaagctactcaggaagctgaggcagcagaatcgtttgaacccgggaggcggaggttgcaatgaactgagattgtgccattgcactccagcctgggtgacagggtgagactccatctcaaaaataaataaattaattaaattaaattaaattttaaaaaaattccacataatccagcaatcccacttctgtgtatgtaaccaaaggaaataaaatcagtatttctaatatttgcatctccatgttcatttcacaattgccaagacatgaaaacaacctgaatgtttgtggaccctgactggataaagaaaatatgacacatatacacaatagagtattattcagccataaaaaaatcatgaaatcctgccaacatttcaacaacatggatggacctggaagacattatgctaagtgaaataagccagacacagaaagaaaaataatgcatgatcctcagctctatgggtaatctaaaaaggatgaactcatagaaacagagagtacaaagctggttgacccagtctcgaagtggggaaaatgggaagatgttcaatgagtatatacttccagtcctgaaatgaattaagttttggggatctaatgcatagcatcatggctatagttaatcataatgctctatatcaggggtatccaatcttttggcttccctgggccacagtggaagaattgtcttgggccacgcataaaatacactaacactaatggtaactgattagcttttaaaaaaatctcatgtttaaagaaagtttacaaatttgtgtttggccacattcaaagccatcctggactgcatgcagccagcaggacatgagttggacaaacgtgctccatatgcttaaattttagtaagacagcagacctttcactgcaaaagaaaactctgcatggtggcttaattccagcacttttggaggccaaggagggtggatcacatgaggccaggggtttgagaccagcctgtaatcccagctacttgggaggctgaggcacaagaatcacttgaacctgggaggcggaggttgcagtgagccaagattgcgccactgcactccagcctgtgtgacagagtgagactcgtctcaaaaagaaagaaaacaaaaaacaacaacaacaaaaaactctgtgaggttaacagatgcattcattaacttaactgtattaatcacttcacaatgtttacatatacaaaatcattacactttacataataaatagttatatacttttaatttgtgaaaagtaaccacacggtccccacacgtatatgtgtgggtttatttgtgtgtatatgtatacacacctcaactaatatagttgaagaatctgggaaaataaagtttaaattaccaattttagttcacactaaaaatataaaatgtagaaataaaataacattagattttcttatatttagggagatgcttagcattataacaaaattactgagtaggaatttttgtagaatcacatttgaaaattccataaggggctgggcacggtggctcacacctgtaatcccagcactttgggagaccgaggcgggtggatcacctgaggtcaggagttccaaatcaacctggccaacatggtgaaaccccatctctactaaaatacaaaaagtagctgggcatggtggtgtacgcctgtaataccagctacttgggtggcttaggtgggagaattgcttgaacccagaaggcagaggttgcagtgagccaagatggcgccctgcactccagcctgggtgacagagtgaaactccgtcgcaaaaaaaaaaaaaaattattaaaaaaaaaagaaagaaagaaacttcataagaaatcataaagcagaaaatacaccacatctgtttgtggtgttactgggattttggaaccaaataccgttatcacgaatactctcacacatttcagacataatacaaacaaaaacaaaacccaaaaccaaaacaaaacaaaacaaaaaccttaaaaaatagtttaaaggccgggcatggtggctcatgcctgtaatcccagcactttgggaggctgaggtgggtggatcacctgaggtcgtgggttcaagaccagcctcaacaacttggagaaaccccatctctactaaaaatacaaaattagctgggcgtggtggcatacgtaatcccagctactcgggaggctgaggcaggagaatcgcttgaacccaggaggcagaggttatggtgagccaagattgagccattgcactccagcctgggcaacacgagcgaaactctctctctcaaaaaaaagaaaaaaatagtttaacatagagttcctcaaaaatacacatatatttctgtgtgccccaagacaatgaaagggcagtcagataataaagtctcttataagccatgaagaggactttggctctcactataacctcaaagtaaggttactttttagagaatttaggagcattagacagaagatgcctctgtacaagagcaagaataaacaatcacgttcctcaaaaatcatctccattggagcagagcttctcaaataactcttgaagtctgtcttccttcttggcctttggagctttcacctgtggcatgtgtttcattcatccaacctacctgggggtttggctatggtctcatgtctcttcacattccagggctcctgtctttgctccagacggctaatcagttctggcttagaaacagtaagacctgttttattagaaaaaagtaatgtgattcttgctgggattctccaattaccaacctagtgttgtgctctgtagataagagagaatattatagatgattctagaaaattaataataaggacaggcgcgttggctcatacctgtaatcccaacattttgggaggctaaagcaggcacatcatgaggtcaggagatcgagaccatcctggccaacatggtgaaaccccatctctactagaaatacaaaaatgagcaaggtgtggtggcacgtgcctgtaatcccagctgcttgggaggctgagggaggagaatcacttgaacccggaggcaaagattacagtgagccaagattgcgccactgcacactccagcctggcaacagagcgagactccatctcaaaaaaaaagaaagaaaagaaaattagtaacaaaataatatttctaaacagaaagtttagaatattttatatttgtgggtctttagcttccctacccaatactacttaatcgaaaattggtggtagaagttggattttaaggtctggtcaataatattttataaaggaatttttataatggaattccaagaattaccactaaaggctgggtagggtagttcacactagtaatcccaacacttcgggaggccaaggagggtggatcacgtgaggtcaggagttcgagaccagcctggccaacatagtgaaacctcctctttactaaaaatacaaaaattagctggccgtggtggtgggcacctgtagtcccagctactcaggaggctaagacaggagaatcacttgaacccaggaggtggaggttgcagtgagctggattgtaccactgcactcaagcctgggcaacagagctagactctgtctcaaaaaataaaataaaataaaataaaaaaatagaattaccactaaactagagtgaaaaatgcccatcacctcaaggtagaagaaagttaatgtaaacataaaacatcttgaaaattttcttctctatcccaacaaatccccaagttttccttgaaagcagagatctaaaactcatttatacaaagcagaaatccccaccaaacattctacagaggaagaaaataaaatcttttgtgtgaaatagaaattgtgtattgaagttattctcacccagagagaccaggtttctgtagttctctagcatcactttcctatacaaactctgctgagcagggttcagaaactcccactcctccagagagaattctatggtcacatccctgaatgtcaacagttcctgaaaaacaaaacaaaacatagtgaccaactgtcaatgggcagagttcttgactccatgtgaaaagagagaattgctgtgacttatgagagttactggaattattcaatctgctatttttaacaaatatattctctgatgtattctctaacactgaggaaagaaaacagaatccatgtggccaggttcggtggctcacgcctgtaatcccatcattttgggaggccgaggcaggcagatcacctgaagtcaggaatttgagaccagcctggccaacatggtgaaaccctgtctctactagaaatacaaaaattagctgggtgtggtggtgcacgcctgtaatcccagttacttgggaggctgagggaggagaatcacttgaactcaggaggcagaggttgcagtgagctgagatcatgccatggcactccttgcctgggcgacaaacaaaaaggaaaacagaatccacaaaaccaatgtagatacttttctaaataatcactataaaattaagggcatcaacacaggcatatacagtttgagttttatgtctacagattatagaataagttgtaaatattattcatacagagaagtcatgatgggttagaaggtatctgtcaaattttaatgtacgtgacaatgaactacagatcttgttaaaatgcagtctgatccaggtgatctcaggtgaagcctgagtttctgaatttctaaaagctagccagttgataccaaggcatccgaatcaagaatattttgtcaaacacaaagtggttgagccccagtttatctgactagtaaacaaagatgagccttcattttccaaagcaagctttaagcaaagagaatctaaaaagaaagggaagtttgcagattaaatgtgatggtttatgtacatcagtcagtaaatctcccaaggtacttacgaataataaagataaaaataattaactttataattaaaaaaaatctgtcacagagagccttaaccaagtgattgaaattaacatgaattgggccaggcgcggtggctcacgcctgtaatcccagcactttgggaggccaaggtgggcagatcacgaggtcaggagatcgaggccatcctggctaacatggtgaaactccatctttactaaaaatacaaaaaattagctgggcatggtggcacgtgcctgtaatcccagctactcgggaggcagaggtagcagaattgcttgaatgtgggaggcggagattgcagtgagccaagattgtgacattgcactcaaacctgtgcaacagtgcgagactccatctcaaaaaaaaagaaaaaaaaaaaaagaaattaacatgaactacaatagaacaaattgatgtacagtgtcaacacacatgggcagacaatcatcagagctatgatattattggcaacaaaaagtaaattataacctgaatctaagcataaagaaacatctttatgcaaagttcaagctacagatatctcccaggttttataacctctaataatgtatttaagtagcctttcctcagcatttgaaagagcaagtcttatctaactattctcttttccagaatattctgagttattctgggcaattagtgacatcctctttaaatgtgcatttttaaaatcctgtttctggccaggtgctgtggctcacgcctgtaatcccagcactttgggaggctgaggcgggtggatcacaaggtcaggagatcgagaccatcctggctaacatggtgaaatcccatctctactgaaaaatacaaaaaattagccaggtgtggtggtgggcgcctgtagtcccagctactcgggaggctgaggcaggagaatggcgtgaacccaggaggtggagcttgcagtgagccgagatcgcgccactgcactccagcctgggcgacagagcgaggctccgtctcaaaaaaaaaacatcctgtttctgcatagagctgatggaacatccagatggaacctaaacaatacacattcccctcttcactaatatctgaggaccctataccatccctaatagagatcttaggtatctacacctttccacattgatgtgacacaaagagaactttatttatttatttatttttgagacagtctcactctatcgcccaggctggagtgcagtgagtggcatgatcccggctcactgcaacctcgcctcctgggttcaggtgattctgcctcagccttccaagtagctggaccacaggcacgtgccaccacacctggctaattttttgggtttttagtagatacagggttttgccaggtggctctggctggtctcaaactcctggcctcaagcgatcctcctgcctcagcctcccaaagtcctgggattacaggcatgagccactgtgcccagtcacaaagagaacatttttattcttacaggtcatacactcgatggtgagaactggtcatggtatgtaagaagcctggatacaaagaataaaggagaaggctctgatatataaaagagaagtatttttcagcgcctcttaactactatagtaagaagtaatatttataagaagaaaaggaggaaaaaaagtatctaaaacaaactggttaggtaggaacatcagaagtagagaagtaaaagtttgtaagttctaaagccaagacattcaagaacgaaaagagaacatcacccctgagctgggacacattcacctgagaaccagccatttcttcctcttgctcttccctttgggattccttctcaggtgatattatctggaaaatcacatctgtaacttgagcatacgccttttaaagcatcagcaaaaccccttcacctgctaccaccgcacccacaggcagatgtaccttaaaggcacagaaaaggccacacttgcttgtcctttgtcattgtcacaggagaatttcaggaacagtgagcttctacctaaagactaaaatgtgagtctccagtttcctgcctttagatgcccttccatgccagagatggcagcaatttctgctgcagcaaagggcccatagggccccactcccctgctcccatgaaaaccaagcacagcaggccccatgacctctctttaaaacaaagcctgggggctaggcgctatggctcatgcctgtaatcccaacactctgggaggccaaggcaggcagatcatctgagatcgggagtttgtgaccaggctgaccaacatggagaaaccttgtctctactaaaaatacaaaattagccgagtgtggtggcgcatgcctgtaatcccagctacttgggaggctgaggcaggagaatcacttgaacccaggaggcagaggttgtggtgagccgagatcgcaccattgcactccagcctgggcaacaagagcgaaactccatctaaaaaaacaaaaaagaaaaacaaaaacaaaaaaaaaaaacaaagcctggggaggctgagtcaggagaatcacttgagcccaggagacagaggttgcagtgagccaagatcgcgccactgcactccagcctggggcctgggtgacggagtgagactgtctcacacacacaaaaaggctgaactcaattctcacttatgtctgggagccctcatgattgcctctggctttatcttacaattacatgggacacttaattaaaacaatatggatgcttccacccaggccaacataatccgtcgagaggacacaggtaagggtatttcttcaaactggccatttaatcctaactagaatgtgatgagctgacaatcacttagctaagaattgcctcttaaactttaatattcggagaaatcatctggtatttcaagccccagactaatttgattctgcaggtttgtttgtttgagacagagtcttactctgtcgcccaggctggagtgcactggcgtgatctcggctcactgcaatctttgcctcccaggctcaagtgattctcctgcctcagcctcccaagtagctgagactacagtcacatgccaccatgcccgggtggctaatttttgtgtttttagtagagatggcctttcacgatattggctaggctggtcttgaactcctgacctcaggtgatccgcccttctcagcctcccaaagtgctgggattacaggtgtgagtcaccgtgcccagtcaattctgcaggcttgaaaggagtccacggattggcttcattcacagctaatgctgaccctgcttgccctagatcacttataacagcactcaactagacaaagcgccacagcacacagtcccttatacctacactcttcttagaacacaaatgcttttggtccaaaataaaaaccaccaatcactattctaaaacatggcgttctctgttggtcctttaaagtttccagaggcagctcatgtctgagtaagtctgcatttggaaaacaacacgcgcacatgcattaatgcgatgtttatggagcatgcgctgtgtgctcagaagcacactatagagcattgtgctgggaagatgacataatgtgaatttatcctcataacaccctgggaggtgggtactaactgtcccataattccctggatttatatgaaaagcccagcatttaaatttcttcttgttctatcactgattttttttttttttttggagatagagtcttgctgtgttgcccaggctggagggcagtggcacgatcttggctcactgcaatttccacctccccagttcaagcaattctcctgcctcagcctcctgagtcactgggattataggtgcctgccaccacggccagctaatttttctatttttggtagagatggggtttcgccatgttggccaggctggtctcgaactcctgacctcagttgatctgcctgcgccccggcctcccaaagtgctgggattacagacgtgagtcaccgcacccagcctttcttttgttttcttttttttttaaatgcatggaataggccaggcacggtggctcatgcctgtaattccagcactttgggaagccaaggcaggtggatcacctgaggtcaggagtttgagaccagcctggccaacatcgtgaaaccccatctctactaaaaatacaaaaattagctgggtgtggtggcacacacttgtagccccagctacttgggaggctgaggtgggagaactgcttgaacttgggaggcagaggttgcagcgagcagaaatcataccactgcactccagcctgggtgacagagtgagaccctgtctcaaaaaaaaaaaaaaaattaaaaaaaataaaaaagcttgaaataaaagctgaagatagacacaagaatgaaatacagaacgggaaaattaagtgtagttcaaagggatttctcagcattgggtttatatttactttcttgtgattcctggagcaactgctggatatgcaggaatagaaaatggtttgctaggtggtatgcctctagaaacagtggttttaattaaaaaaaaaaattaaagaccaaaaatatttagttatttgcttccatttatctgcttttgggtttggaagaattgtgaacaaccactctggagaggcagcaggagccaaactctgatctcctttaatcaactctgtatggagattccaaggtggagccggacctggatgaggcctcagaagaggtgaaacgtgggtaaggctgggacagggagagggccctaggtagaattctgatctccatgtcactggggtatttccaattctgtgttttctaagcctgcccaagagaaacttgactccccaggtttgtgtgattttaatctatttcacccaattccctgtctattttataacatacagtaacaaggaatttaaccaaaatgcatagtgttttctaggacatgtatattagaagctaaatatttagtcttcacaaggtaaaagcaatagaaataataactatagggctgggcgcggtggctcatgcctgtaatcccagtactttggaagaccgaggtgggtggatcacctaaggtcaggagttcgagaccagcctggccaatatggtgaaatcccatatctactaaaaacacagaaattagccgggcgtggtggtgcacgcctgtaatcccagctactcaggaggctgagacaggagaaaatcactagaacccggtaggcgaaggttgcagtgagccaagattgcaccactgcattgcaacctgggcaacagagcgagactccacctcaaaaaatagaaaagaaaaaataactataataacaactcttctgttcatgagtggcccttcagatggtgacatcagagttcccaacataaggaaagtggccctaaatcccctgcacacgtcccttttttgtactgactccatggtgtgaaattcagccatttattcatttgccacagacacagttcctggattgcagagattatgattgcctcatctgtttttctaatcgccatatgaaatgaaagtaattggttgatcagtctccagctctccttttttttcacccaagtgaaaactggaacaactcccatctaggaaccaaccaaagagattatttttgtgagaaagagaagaaacactgaatgacttattcccctccctcttagatggtagcagaattagaccctcttgtcagcctcaccccagtctgcacacaacaacctcaaatgtctcaaagactctcaggtgctgggaagagggtctacagtcactctgggttgatgtcctcatggcaatccaaacaggaaacactgagactgattctgtgggaacagaatagacaatagaacttccctggtagagcttcagatcctaaacccatatgtgatatcacctgtccttaatcagttagcttgggtaagaggaatgacaggaatattttattccagtatcacagcttacaggtaggtgtggttgttatggtcatggctgtagatattttgtggcctggaccccccactgctggggtgattctgccatcagattctatttacaccaagagcctctcacacaactgcagcaggtcagaggacaagatctggaaattttcaaggaccacactttgaagggtggggctctaaaatgtcgatgttgacctgtcacgatgcagaaaatgtttcctatgggctttctgtacattctcaatccaaagtcaggtcctgtctcatgagtcccagaagccagtgcttatatgcagattctagtgacatcaacctggctgtgcattattgggtgttatagcatgctgcgcaaaaccagaggagagatccagtcatggagactgctctaacacattataaatgatatgtcggccgggcacggtggctcacccctgtaatcccagcactgtgggaggccgaggtgggcggatcacgaggtcaggagatcaagaccatcctggctaatacagtgaaaccccatctctactaaaaatacaaaaaattagccaggcgaggtggcgggtgcctgtagtcccagctactcgggaggctgaggcaagagaatggctaaaaaaaggggaatagaaaagtgggccgataaaaagttctttgtcaaggattctcattagtttacaggaataacattgattagtgattggccatacagggttaagctagaaggtgtgggctatagtgtcctgtgtggcattattagattaatttatagctatgtgtggcagtaacaagcagtttcaagaggtgaatacattgctcaaaggagaagtaggacataattctggattcattttaatgtctctctgagcctgataactaacagaacttgcatccctcagataaaagttcttttactttctcaaatcccagggcctggattcaaatttgggggtttcagatttaggttgcagaggtatgggaaagtagcaggtgccctttgcacattctcaggcatttgtacaggaggaggaaaagaacattttaaattcttaggtctaatcaatgcatatgtgtaaccctgacagggtttgtctctgaattcatttcagatttgaagatgccagggacattgaaagaggtggaatggttggttgctgccctgtaaggttatttttgtagaaatctgatctgactgctctacaagggactatagatcacaaataggcagagagaccattttgcctgcaatttggggtttgcacaattgtgggttgtgacttgaagcccaagagggaaagaccctctagggtgaagtctgatgggtaccttacatgtttatatcatacctggtcatttcagacagtgttttcaaaaatgtaattaaaagcacaatcatctccaaccccagaaaaactctccacaatggcagaacacaaagcaaaaaccatatgattacacaattaagccagaatgtgacattaattgcaggcaatttgctaagagattgcaaagatagaaagaaggttgtcataattagtcctcaagaagaccacgtgacagcactcacttgtcgtagatagtttatcctaaacccacctgggaattggggaggtcagttgattatattctatgaaagataaacttcccacatcttcatgacaggaggtagttttgcaacttggagccaaattcaggtacttgctgaaggtagggttttacttctctgtagaaactgtggtgccaggtgcggtggctcactactgtaatcccagcactttgggaggccgaggtgggcagatcacctgagatcaggagttcgagacaagcctggccaacgtggtgaaaccccgcctttactaaaaatacaaaaaattagccaggcgttgtggtgggcacctgtaatctcagctacttgggaggctgaggcagaggcaggagaatcacttgaacctgggaggtggaggttgcggtgagccgagatcacaccactgcactccagcctgggtgacagagggagactccgtctcaaaaaaacaaaaaagaaactgtggaagagggatctatgttcttggctatttatatattaaatcaatggttcctgactcagagtactgggccatggtgcttctgcccatgaagcttagcctacagcctgcagcccacacagaccctcactgctgcatctgcgctccagcaccatgccacagagcagagccctgggctgcaggaggagggcctggagcactcctggttagaattgtattttcacaataatggaaatgaaagtggtgttccagcctaagtttctggggttctcttctttttgagatggagtctcgctctgtcacccaggctaaagtgcagtgacgtgatctcggctcactgcaacctccgcctcccaggttcaagtgattctcctccctcagcctctcgagtagctgggactacaggcgtccatcaccacgcctggctaattttatgtatttttagtagagacagggttttgccatgttggtcagactagtctcaaactcctgacctcaagtgatcctcctgccttggcctcccaaagtgctgggattacaggcatgagccaccacgcccggcctccagcctcagtttctactgacaacgatgacatggaaaaagtactactggatgcccagcaagaagtctggatggagttgctccacgagttgtcaccgtgacagcccacctcactcacagacacaaggaaccaacagagcttctgaaacacccaaggcattggagagaaaaacagttattagtctgtggaagattatattgacagaaagaaagaaattgaaagcatattgaaggaatactcagattagatatgggattggttaagtgagcaagaaaaaattccccccaatgtttctctttaaagaaccaaagtgcacagctactctcagcatgagaaacacacgcattctgaagaacagatacatattctatccagaatttctagaggtttttcttccatctttgctgctgtctcatctgctggccattggactagggatttatattggaagccatctaacaacatccaccagcatcttttgatgaggaataggaaaccaacgttgttcacatattggaattatatctgagcttgcggcatagctaactgaagagctattatatccgtgggtgggtgactgcatccgttgcatttattagttctgtaaatgccgcatgcctaagttagtaaaatgaaaaaatagggccaggcgcggtgactcacgcctgtaatcccaacactttaagagaccgaggcggacggatcacctgaggttgggagttcgagaccagcctgaccaacatggtgaaaccacctctctactaaaaaaattagccgggcttggtggcgcatgcctgtaatcctagctactcaggaagctgaggcaggagaatcacttgaacctgggaggcagaggttgcggtgagccaagattgcgccattgcactccagtctggggcaacaagagcaaaactccatctcaaaaaaaaaaaaaagaaaaaagaaagaaaagaaaaaataaggtcaggcccggtggctcatgcctgtaatccaagcactttgggaggctgaggcgggcagatagcctcaggtccaaagttcgagaccagcctggccagcatggcgaaaccccgtctctactaaaatccaaaaaccagccgggcatgttggtgcgtgcctgtaatcccagctactcaggaggctgaggtatgagaatatcgcttgaacctgggaggcacaggttgcaatgagtggagatcatgccactgcactccaccctaagcaacaggctgaaattctgtctcaaatacatatatacatatagacactaaaatcatgctgacctataatcatacctgttggattaattaataagcatattaattgatgtgacagaggtggggttaatatctattgtaacaatttgttactatattttttcctttttttgagacggagttttgctcttgttgccacggctggagtgcagtggcatgatcttggcttactgcaacctctgtcttcctgtttcaagcaattctcctgcctcaggctcccgagtagctgagattacaggcgcccaccaccacgccaagcaaatttttgtatttttagtagacacatggtttcaccatggtggccaggctggtctcgaactcctgacctcgtgatccacccacctcagcctcctaaattcctgggattacaggtgtgagccaccgcacctggcctattttcttttgatataagatataaatatcttaggataaacaattttaacatattagtcataacgtatgtagtattagaaaattatctgtaatattaattcagttaaaataatttatatttcaaaagaatacagaatatcaaaatcattattttaaagcagtttgtccaaaataaatattgtgctgttatattcactattgtacaaaatactgtttgtttgtttttttttgagatggagtctcactctcttgcccaggctggagtgcagtagtgtgatcctggctcactgcaacctctgcctcccaggttcaggcaattctcctgcctcagcctaccaagtagcagggattacaggcgttcaccaccacacccaactaatttttgtatttttagtagaaacgaagtctcactatgttggccaggctggtcttgaactcctgacctcaggtgatcctcccacctcagcctcccaaagtgctgggattacaggtgtgaaccactgcacccagccgaaaaaatactctttaatttaaatggatgcagtttgtctacacaagagtacatataactatgccaactgttcttaaaatataaatagaaaccaaggtacagagcgtactctgagctggtcttgctatcgcagcataagcccttcagcctgcacatattagtaattaccttggagcagcagttttctattgaaaacacctatcgtttttatctctccagatactgaagagatacccttctgtatctgtgaccctttagctttctggattgctgaattaaatcctatccttcgtgttttctgagacaaagttttgctcctattgcccaggctggagtgaagtgggcagatcacctgaggtcaggagttcaggaccagcctggccaacatggtggaaccctgtctctactaaaaatacaaaaaattagccaggtgtggtgacgggcacctgtaaacccagctactcgggaggctgaggcaggagaattgcttgaacccaggaggcagaggttacagtgagccgagattgtgccactgcactccagcctggacaacaagagtgaaactccatctcaaaaaaaaaaaaaaaaaaaaaaagatttacatatattttgaagaagcagagaaaaaaggtacatataaaagttttctaggccgggcatggtggctcatgcctgtaatcccagcattttggaaggccaaggcaggaggatctcttaaggccaggtgttcgacaccagttccgggaacatggtgagatgctgtctctataaaaaaaaaagaaaaaaaaaaaaaaaaaaaaattagctaggcaagttggtgcatgcctatagtcctaggtaactgggaggctgaggtagcaagactgcttaagcccaagagttcaaggttatagtgagctatgatcatgccattgtactctagcctaagtgaaagagtgagactctgtctcaaaaaaatcaatcaatcaataataaaagttttctaaattctatccttcaggaaaaggcaaaagaacaaaatgtcttccctcattttcaagtgggggaatgaagccccttatttctaatttgtatttgcttctgcaaaaggtaggtctaggcccatggtcttgaactactggacatctgacaactgaggggtggcgttgggcacactgtgtgcacataaaaaaagggtttgtgggggaactaaaaggcaaacgagggaaagttgctatctagaagccatgggtgggacagtgcagggttacggaaggactggttcatgctatagattgtgtcccaggagaggctatgctctgacttcttcctgtgtccatgcaggcagatgagactataatcaggtggcacagaagcctgggttggtgaaaaaaccaggttgccagtacagactacctttcaagctctactgataatttacacttaattaaaaactgaagttaaaataagcaaagaaatctttccaaggtgacaaactcaggaagcggcaatactgattggaacacagacatatctgactcagatgtcaagtcaagccattctatcatttgggacattttcccgccccatcctgctcactgaagtggacaataaccattctaccaagagccactgtgctgtgccccactgtgtcccttagatgcattttgctttgcaggtttttgcactgcctcactgggttgggtgttccttgtccttggggatattttttttctctcttcaccaatctgagaaaattttctcctcaatactagcatccaaattgcctggccagcactgtatctctaagaaatggaaactgggagttggggaagaaaatcttaatgtcctaatggatttgctttcagaggaaaggtatacctgatttctcccaggcacaatgcaccaaccactccacagagaggccacattcccatacctggcagggttgcccctgagaggagatggcccaggggctgatattcactagacacctcaggagacacagccactgtgggcatctcatgtcatccccagacagttctgaaactcaaaaccaggaaaataacacagggtggctgaggatgcattgccctgtgaagtttccaaagtggaacctcaacccaaaaacattctgataaggtgtctgtgcctaggaaagattaaagggagattggcacaaaggtttttgttttttggtctttttttttttcatggtggagtgttgggattattctctgctttcatctcctgtaaaatgtttgcaaatgaaaaacaattctttttctaaaaagtgccatccgctgctctttgaaataatgatcaatcaaaatactgtgtctgaaatgtacaaaaaaggactaatagttgataatgttgtgaattagagaggggaagttggtgttgaagaatgtcaggaaagaactgaaaatttaaaattcaactgcaagtcagagttaggctggggcaacagagtggtagctttgagattctgtttgtcacacatttggaaaatccaagagaaaaccacttctgtggagtgttaaataaatagcaggcagttagactgaggtggctctagtaccctgagttcctacattaaaaaaaaaaaaaatcaaaggcaaatacatttcttgtaaattgctaccttagggggaaacaaaattcagatttttcagatttaagcaaccacaaaccttcaattaacttctgattacataaccaggcaatgacaacctgaatagtctaaataagatgactacataactggaacgagtcagttactgaattcggtttgcttcatcctgcactttataaaaaactttccttcaagctcttcggctggacccccaaccacaaaccgtggctgggtgctctctgagcataaatcactgttaacttcaataagttttcaacattttaaaggtgactcccatagtttttaaacaggagaaggaaaagactgaggacccccgggatcacagcacttcccacgcacaaaccacacacggggtctggactctgccctgaggacgcttccattgtccccgcagtcggggcagacgcaagaacgcgcgcggctcttcccagggtgggctccgggcgggaagcgggagaacggaacgggatgcccgcccagggtcccggctgctggcccacctcgcatcctgtgcccggaggtgatcgacggccgagctgtgcctgccggggactccagtccgcagactccggagctgacagctgggaggccccagtcccgtcactgccggttccggccggtttcaaccagccctgcccccacctcgggatgcgcggcctggcacactcaccatttttcggcttccgggatgtcgtggagtcttagctctggatctcacagcatctgcaagtcagagggcaacagaggctgcgacagtcaccgggaactactagagcagaggatactaagcaatgaagatggaccctgagctctggctggagcgagacaaaggccccgccagctccaggacaccgccccctctaccttggctgcgcacctgattggacagttcccactctagcgcccatgattggatacagttccatgccccgccccctcaggtcatgagtgacaggaggcgtgatctgagaatgtgttgaataaggcaagagttacaggtttttcctgaacccttttctggcgcgcttccttcctgaattggaaactggcccttcctggggaacatttgcatttaactttgtatataaagttatctttatttgtgaatagtatacatatgttattcacaaatggaaacaatataatgacaattattttaaaatctcagatttcatcattttcctagcctccagtcttttgagcaggcagcctaagatgtcgcaagggaggcaattctctaagaaataaactgtgaagcacatatgaattttacattttctagtagccacattttaaaaaagaaaccaggcgtggtagcctgtgcctgtagttctagcaactagggaggctgaggcgggagcatcacttgaggccaggagttttaagaccagcccgggcaacatagcgatgatcccatctctacaaaaaataattaaaaatttagccaagtctggtggtgcacgcctgcagtcctagctactcagaaggctgaggcgggaggatcacttgaccctgggagaccaagactgcagtgagccacgatcacaccattgcactacagccggggtgacagagtgaaaccaagtttaaaaaaaaaaagatctctgaagaaggcattttctctttctgcaatttagccaagcagctgagtatgtcttgaagtcatcttctaatttttaacagggcaaggatgttttctaaaaccccagtctccagagttgccatggggcaaatcccggcagcatacatgaaaatcactcacagctaatgcattcttcatcagatccagtgcttcttacccctggcaaataaaaatcacctgcggggttgggagcggtggttcacgcctataatctcagcattttgggaggccgagacgggcgtatcacctgaggtcaggagttcgagaccagcctggccaacatggtgaaacccccatctctactaaaaatacaaaaattagccgggcatggtggcacacgcctgtaatcccagctactcgggaggctgaggcaggagaatggcttgaacgtgggaggcggaggttgcagtgagtcgagatcgcgccattgcagagtgagacttcgtggggagggtggtggtggcggcggggggtgtggagaatgactggaggggcggggcaggatgtaaacttaaaatccctgaagcccaagttgcaacagaccaattaaattagaatccttggagttggatctgggcaacaatatggtttaaagctctcagggtgattacagtgtgtagccaagtacccaaactactgcttttcaccaacagctttttcttttttttttttgagatagagttttgctctttttgcccatcctggagttcaatggtgcggtctcggctcactgcaacctccgcctcccgggttcaagcgattctcctgcctcagcctcccaagtaggtgggattacaggcgcttgccaccacgcccgctaactttttgtatttttagtacagacagggtttcaccatgttggccaggatggtcacgatctctcgacctcgtgatccacccgcctcggcctcccaaagtgctggaattacaggtgtgacctaccgcacctggccttcatcaacagttttgatgaattagttataaatggtttttcaaatgcatgtaaaaacgtttgctgctgagttgtgaccttacaatcttaactcatttcccacttactatactttgcagaaccaacctctgctactcgctttgttcctgattgaacctggttccatgtgtgctcagtgtatactatgcacagggcactgtgctgtgtgccctggtcccggtgagcatcattctcaggggagaaccttgctgaaaacaaaatcacatcccaaaaagttaaaatcatgctactggccgggcgcggtggctcacgcctgtaatcgcagcactttgggaggccgaggcgggtggagcacgaggtcagacgttcgagaccagcctggctaacgtggtgaaaccccgtctctactaaatatgcaaaaaatgcaaaaaattagccgggcgggggggcgggcgcctgtaatccgaactacttgggaggctgaggcaggagaatccttgaaacctgggaggcagaggttgcagtgagccgagattgcaccactgcagtccagccccggcgacagtgcaagactccgtctcaaaaaaacaaaacaaaacaaaaacaaaaaaccatgctacttaccgaattgaggtgaaaattaaaagacctagggggtcacccaaaggttagaacatgaatcaataacttggaatattaatatacatctgatggtgccctgagcacacatgtccattttattttattttatcttaccttattttatttttattttttgagacagagtcttgctctgttgccaaggctggagtacagtgccgcggatctcggctcactgcaacctctgcctcccaggttcgagcgattctcctgcctcagtctccccagcagctgggattacaggcatgcaccaccacgcccagctaattttttgtatttttagtagagacgaggtttcactacgttgggcagacctcgggtgatccgcccgcctcggcctcccaaagtgctgggattgcaggcgtgagccactgcaccccgccacgtgtctgcctttaaaagaaaacaaaataaagcattactattattctcaaatattaatttataactattatgcaaacatgtaatatttaaattttgattgatgtatagcatgcatacataaatatatgcgcaaaacatttatggaaaacttgatgaattattacagaccaaactcgtgtaaccaagaaatagaatcagacttgctcatgcccgacagtcactttctccttctcttcacaaaagtaagagcttaagagctaagtgtagatcaactttgtcattttgtacaagtgttttattacagagcattaaaaacatatccaaaatacaaagaaggtgtataatagacctgtcacccagctttaacagcaacttgacatgtgccatttttgtttcattgatatttcaacccatttcccatccctttattaattttttagtttttttttagataaaatgtatatacattgaaaggtacgatcttaactgtaccttttggacaaatcaactcactcatataaacatctcctcttttaagaacagaattactccacttaatcattaatgtacccataagttacctcaaagtattatttaaaatctagatttttataaaataggtctgagtttggactgagaattcatatttctaacaaagtacggatccatagagcacatggtaactacagagtctcttttatctaaagtaaatacaattggatgaataaaattaagaaaaattgacctaaggtgaaaggacaaatcaaaacatctgtgcaatatgctatctgtaggagcatttggttaagaaaaatataaactcaccaaaaagttttattattttaataatgcaaattggcaaaattcctactattgttttcatagaaatgctccctcacaataaaacattttcatataggaacggttacagtggctcacgcatgtaatcccagcaatttgggaggctgaggcgggtggatcacgaagtcaggagttcaagaccagcctggccaagatggttaaaccccgtctctactaaaaatacaaaaattagccaggcacagtggcaggtgcctgtaatcccagctactcaggaggctgaagcaggagaatctcttgaatctgggaggtggagtttgcagtgagctgagatcataccactgcactccagcctgggtgacagagtgagactccatcgcaggaaaaaaaaaaaagaaagaaaaaaagaagaaaattcatatcataggaaggcactggttaaaaatagcaaatatttgaaagtaaatgtcttataacattaagtagcagataccttttgaagcccatagatggcctttacatagttacccaaaattcagttgtttacacagcaagtgcagataatttttatagcttcctattaaattgttattaaaattaaatttattaattttaattaaattaaaattatatattaaaattatatgttaatgcccttacaaagttttcttctaaaattcactaacttaaattttgtatatgacatataagttccctttacattcaacttaaatttccttaattttattaggcagtgcctgtgtgtttaccacccagtattatttggggttcctccaacagacatcacggttggggaaacaggctgttcctgcttctttttcctcttcagggcatcagttcatcagtcaaccaagtcgtgtgggagtggaggtcatatattccctagcatagagggtgtcatttctgagcactctgctcagagtagaaaaagaccagaaggtccttttagggaacacttacttggggagggctaagccccttaaggtgtgagagctctaatcagcaggtatagacttttcaggagggagggatgaggcagccattctgaacctggagctccatcacctcttgtcccatctccagacaattctagagggctgttcaggaacatgtctgaaaggtgcacatggaggaacagtgtgggctttgatctggcttagatgacgtctgtcctggggaggcaggaggtccatgctcagtatctgggctggtatctttgaggtcagtaggttgcctttttgtatccaagtccattttcactagggaagaggccagacagtctaaatggcttccagagcccctctctgattctctttgggagatagggtctgaaagaggctaagtcagtattttggggaaattctacaaagtctggttggaaactgggaagacctcttgcctggtgcttaaatgctccatttgcagtcctagccatataggtgtttggtagacatagagctgggtttgcatttatatcagcacaaccttatgtcagagctgaagaagtggccaggataagtgtcttggttgcaggctggagaacatcataaaagcaaactgctagtttgctgattttcatcttggcaatgagcattgagtcctggccaaactgcttgagtgcagcatgaggccaattcataaatccacctccacgcatcagctgtccataagataagaggaagctcagttcatgttttgacgagaggctctgccatgtgaaagaatcacatctcaggtgtcttgacagctggctgacttgtgagaaaagatccaggacagatctatttttggatgcatcgacaggcttcagccttccagaataatgtgggagaaatggcttgcaaataaaatatggtaggaactcctgataatgaagagtaaaaacatgaacttaataaaaataagacagaacctataaaaacatgccatagtaaaagaaatacaaatggacttttctagcataaagaggcattcaaccataacggtgatcaggagaaaataaattacaaaataaatgtgttttgttggtgtgtgatcagggatactaatctgcgtctttgtttgggtttcattttgagattgaggatgggaaatggcttgtagccctcagggggctttgagaaatgtggcaatcatccccaagagctatgttcttcatgttcattcttgacactggctgaagagcctcagctgagagaatgacccacaaatacaggttagggatagactatggggctctgtgcttagagagaggagagtcacctaaactcctctttaccacagcccaatccaaatgagggtaattccaaagaaactaaactcaaagccagaaacagcactgctaggttaggcaagaatttgactcttccaaggtgaggagaaacagaggatggattaacacagtcttccctgggaaggaaactgggagttattttagcaactagggccttatagatcctggactctgtgtaaaaagtaaagtagaggttcctcttcaaagactttcctccccatctaattatgaataaatagtaacttctcttagaagcaaaatttattcaaagacctgtgctcctaaatatttgccctggcatgcttatactggtccaagcaagcattaggtcatagcctgttcctcttccttatttaaaagtgtttttacctttctcagcattccacaagttacttcctacttcctttgttctcctctacctttgtctcttttaaaaagttctaagttgctagccaatcgggacaaatgcagaatgtgaggtcccattccagcagtagggtggatacgtcaggttataaataaccctgtctcttttgttcgatgtactcttgtggcaaaactgctggcgagtataccctttctgcaggaagtaaaaatgcccttactaaataaattaaatttatgttcaagggctatttctttacggcactgaaaaacaaacatttcaaatactctggaaacagaaaatgtagctcctgcagaaaaaataaagatctgctacttctcagacacttttacactcattgtagtagtaaatgacagaacctgtggtggtcctaggaaaaaaacttgaacaatgtactcagaatggcgaactctgggttttcttgagggccaagactactgacatttcatgtgttatatttcatgtaagacatttgatgtcttttggataccttatgacagttatgcatttctttataatcagaaaaaaaattagcatgtaatcatgcatatatgtttgtatattgtacaatgtatcaaaatgaatatgtatatttatattctcccccttaaattcagaaaaagctgaagctctttactctctcagcctgagtccagggaggacggatatccacaaattagtggatacaaactaattagcattctctaatagagaagcgtttctattttttgcagtttgataaactcatggtgaaattaccatgctactttttttactttttattatttaatataaaatctaagacaagatacattaagtacttagtgacacacgtatttattcctcacctgattcataatatctgcctaattttaaactttcttccattttataggttcaattgatcttattttattgtaggatattaaatctaataccagcattgttattttatatattatgttctttaattttgtatattttctattggcattttacactgaaataatgcagtgtttcatcatataaatgactttatctgtatttaaaaaataaaagtctggggccgggcgcggtggctcacgcctgtaatcccagcactttgggaggccgaggcgggcggatcacaaggtcaggagatcaagaccaacctggctaacacggtgaaaccccatctctactaaaaatacaaaaaaattagcggggcttggtgtccggcgcctgtattcccagctactggggaggctgaggcaggagaatggcgtgaacccgggaggcggagcttgcagtgggccgagatcgcgccactgcactccagcctgagcaacagagcgagactccgtctcaaaaaaataaaataaaataaaacaaataataaaataaaataaaaagtatttgggtattttttttttggtcttataatttccatattacatagtgatgagataaacattaatgttttgagagtattttaaacttttgataatgactcatttgatccacatggaattttttactgcatgtgtgggttgaaaatctggttttgttttttgtttccttctttgttcatttgttgagacagagtctcattctgtcgcccatgttggagtgcagtggtgcgatctcagctcactacaacctccccatcctgggctcaagtgattctcctgcctcagcctcccaagtagctggattagaggcacgcaccaccacgcctggctaatttttgtatttttactagagatggggtttcaccatgttggcaaggctggtcttgaactcctgatctcaagtgatccacctgcctcagcctcccaaagtactgggattaaaggcatgagccatggcacctggcctgaagagctgatttcgcttctgcttcatcttcaacctgatctccccagaactgatagctcttgctgtaactgggggatagcagtttattattccaataaatgtggcaaattcaataacatactacaaatcagttggaaagcaggacatgccttcaagacatacacaacatgcaccaacctatgtacaacaataataatttgtaaatttcagttggaatggaaaataaaatgacaaaaagattgttaaggtaaattaaaatggaggtcaggcctgaagaattcctgagcagaccaaatcagttaggcctcataagtaacctcaaccttgcttgatttccaaacataagcaaaacttaacttgaattctttcttgtagctgcctattttaaagaaaaacagaaatgaatctcaaccaatcagaagtagccaacaaccttatatagctaggaacttttcaacaaggcaaagaaaccaaaaaccgagaagaaacaagtttctaactaccactaattgagtaatttattttgtttctacattttcccaataaatagttgcctcttacactgtcaatgaaacactaaacctcttttagactggtgtcctataattaatcaattgctcctactcaaactctttacaattttattgcgtctcagattactttttagcagaataaaataaactatctaggaatccatattacaaaaacgtttacagaatatcagaaaagacagaatgttcatacaatatatgaatgtagacataagcaaatagaaaacttacatgttcttaggcagaaaaactcaatatactatcaatatcaattgtctttaaggtaatttagaaatttaattttgttctaatatagatatcattagatattgaggtaggcattttactataaaatagcatataggctgggtgcagtggctcacacctgtaatccagcactttggaaggctgaggcgggtggatcacctgaggtcaggagctcaaaatcagcctggccaaaatagtgaaaccccatctctacaaaaatacataaattagccaggcatgatggtggatacctgtaatcccagccacttgggaggctgaggcgggaaaattgcttgaacctctgaggcagaggttgcactgagccgagattgcaccactgcactccagcctgggcaacaaagcaagactctgtctcaaaaataaataaataaataaataaataaataaaacagcatacagatgaaaagccaagaaaagccaagaaaactgtggaaaaaaaaacacacacaacaaaacacagataatattggccagccgtgggaaaaatcttgattgattaaaaaagctaataatagatcattggaactaaaaattcagaaatagactaaagtgcctaagaaactgtcttagtccatccaggctgctgtaacaaaataacttaggctgggtaatgtaaaaacaacagaaatttatggctcacagttctggaggctggaaagtgctagatcaaggcaccaagaaatttggtgtttggtgacggcccagttcctcacagatgataccttcttggtgtgtcctcacatggcaaaagagacaaggacactcccttcaacctcacttattccattcaggaagatgaagctctcttggtttagtcacttcccgaaaggtcgcatgcctaatactatccacatatgaatttggagggggacacaaatacttaaaccacagcaaaaatttaataagcaggaaaaactagtggaggatggcatcactaatacttgacgtgtgaaaaaccgatgttcctatcacaaaggaaagaaatgactcattcttcatgacatagaacaaaataaaggtccaatgaaagataaatctatacagaaaaataaattggtgttgataaggtgaattctacaggttgtatcaggattttggaggtttctggggatgggcagggccccagagtttcctcctgtgacattttccctgaagttgctcacgctcttactcaatttgaaagtggataaaaatgttttttcctgttctaatatttaagaaattcaaaacaaaaaggcctatgtatgcacgattatcaaacaatccgtcagtggtgctctgctaaggaagggcaaagaatcccacatccacaaaagtacgatgttctgtcagataaagatgtctccctgtgccagagccacatattttacacatgatcagaggctttcccagggaagcattgctctgcagcccttccacagacttaaccctgagaatttgacttagaagatcactgatgaacacacgcccaagcgttctgatctacatgaatcctctcttaatggttccttccagggatctgggatctttcccaaagtcatctgtcacacacagattgactcaaaaatgtggacaaaagctttgatcctcactggcacacctgctctgtcttatcagcttctctagaagtatgctgctctaattgctcctgagagaccccatcttaaggtatctctctgtgccaacataattgatttcataaagtgggaagagaataggcaagagtcaagctatgctgggggctgtctaagattcccttacctatgtctctaatttacgcacatattgactaatacagattcatctctaagtggtaggaaatgggaaggaggagccccagttctcagaaagagaagccccagttcacagaaggagaaaatgtaatcaatgctgcctagcttccagcttcagcttacctatgggggactgagtctcttctgaaaaaagcagctgttctccatagtattagcctgttctcatgctactaataaaaagacatacccaagactgggtaatttataaaggaaggaagtttaattgactcacagttctacatggctggaggtgggcggtcggttcaaaatcatggaggaaggcaaggagaggcaaagtcacatcttacactgtggcaggcaagagagcatgtgcaggccaactgccctctataaaaccatcagatctcgtgacatatattcactaccacaagaacagcttgggaaagacacacacccgtgattcgattacctccctccaggtccctctcatatcacacgggaattatgggagctagaattcaagatgagatttgggtggggacacagccaaaccatatcatccatcatttgaaggaactgtggtctcaggaagctaggcattgagtgtgcacgctgccccctagaattccacacctacatcacagagacagaatagtctcaaaggattcttaagggtaatatgggcagccaaaaggaggagatgaattcacagcctctgccttaccttctggtctaacaaatactactcctatcctggcccaaaaggattcccatactcttttctgggttgcacaaggagtaattcagaaagacaaaaacttattaatgccccttcattctccataacttctgaggtaagttgttcattccctgggttttaggttgttgttctctctctacctccacagaaccagtgtgtcccattccattacctataatttcacccatattcttcttacctcctactttctcctagacattttatccagtagagccaggtgaaatacagacaagtatatttacacaaaacttaaccagaactaagttggagtcccataagccctattgggctgcgatggcactcaggctggcctaaggttgtggttatggaaaagaatgccacattttgcccaggaatgatcaatgtggaatctcaaatttgggaaatagatccttagagcccccaaccgtttcatccttctcttggaggcaatcaggaagagataatccccttttggaggaaaccatgtctaatcaacaaattacctaaccaacatgtgtggaaaaggaggtaaaatcagacagttgacccattttagtagatttggtaataaatgccacaaagtcagagttcaagtggtctcaaaagcctaaaaggcgacacagattagtttcaaggaacacatggtgtcactgagtgttccaacttcccagagggtgagtaccatggcaactttgagcaggctgggaaacgatcccagacccttgagggtctgtgagaaatcaaactttcggcactttggaagtcaggaaaccagcacgttgggggaggcgggatcacagttacttgctgagacaagctgccctggctacgttcactcccgtcaggtaggagaggttaaagaacaggaaggctccccctccgcagggcggaactgctctgaaggcatggaggagcgacgctgaaggtggaggcttcgcccaccatgccgggagctaaaatttcttaaccaatgccggccagcgatggcagggctgcgggactacaatcccagcgcgcacagggatcagggactgtgcgcatcactggaagaagcggcagaacggcgcgcgcctcgctgagctttctgggagatgtagtctcatggcaactcccagccttttggccacaaggctacgggacctacaatcccagcctgtaccaggatcgggagcagttcgcagcactagaggaaggggcagggcggtgcgcgccgcgcctgatatgctgggagctgtagtctcttcacggtttttagccaatgagtaggtagcttcagaactacaatcccagtatgcatgggggcggtgcgtagtcctggaggtaggggctgagaggtgtggacttaccggtgtccaaagcattgctagcagccaattccatgccgccccgttgccagggagagtgaatacagctagggacgtgaagggtaggtctgggctgggcattgaggagggtattaggctaggaagtatacctcacctttgtccaaatcgggtggttcggcctcctctcattggccctatgcagctgggttgcctctctcacccgcacccaagggtctttccagagtgttgcgtcatttccagcccagggagctgccttctttcctaaactgcaatggaaactgtcctgatgtctgagacaatgtccgttgtgccgcagccctctgccttctctagccagagcgcgagctcagctgcttttgagagaaatcagccacctggcccacctgtgcacaacttcagagctttgtagggggtgacaaggactgtgtcttcagggaaatgtcacgggcattagcgcctttttcgcaaatgtgaaagttgagaaatcaagaaggttaattattgggttgcccaagatctgctaagagcaaaggagaaaactccgtttcccaggcatgtgtcttgtgagccatttttaaatcaaccctcttaagtggacaagctccagaacacaacatgaagctgatgatgacttaggcaatttatgcttgaactcattggcctcatctcaagtcagtgtctcagagacacaggtgggacctgatccccaaggaacagatagcattccagattcatgggagcaacttttgagatgtggagcacccggggggtcatttgaaacccatcaggttgccgggcgcggtggctcacgcctgtaatcccagcactttgggaggccgaggtgggtggatcacctgaggtagggagttcgagaccaaactgaccaacatggagaaaccccatctctattaaaaatacaaaattagtcgggcatggtggcgcatgcctgtaatcatagctactcggaaggctgaggtaggagaatcacttgaatctgggaggcagaggttgcggtgagtcgagatagcgccactgcactccagcatgggcaacaagaggaaaactccacctcaaaaaaaaaaaaaaaaaaaaaaaaaggtgtgtgtaatcttcagttttcaagatgattacaaagataatatttatagaaagtatgcaaaataaaatacaatcaaagcatgccaatagaaagttaaataaaaattaagaaagtaaaacaggctgggtgtggtggctcacacctgtaatcccagcactttgggaggctgaggcgggtggatcacaaggtcaagagatggagaccatcctggctaacatggtgaaaccctgtctctactaaaaatacaaaaattagctgggcttagtggcacgtgcctgtagtcctagctactcgggaggctgaggcaggagaatcacttgaacccgggaggcagagattgcagtgagccgagatcacgccactgcactccagcctggtgacagagcaagactccgtctcaaaaaaaaaaaaaaagaaaccaagtaaaacagaaaatgagaaaaatataactactagaaacacataaaacaataacaatataactagtaataacttcatttccttaataaattattttaaatataaattaagtaaactacttaataaaatgaaatgtagtcttaggactttggaaggccaagatgggctgatcacttgacctgaggagttcaccaccagcttgggcaacatgggaaaactctgtctctacaaaaaaatacaaaaaagctagctgggtgcgatggcaaatacttgtaaatcagctacttgagaggctgaaatgagaggatcatctgagtttgggaggttctggcagcagtgagccctgcaaatcagcctggttgaccgaatgagaccctattgaaatacaaatgaggcctggcgcgttggctcatgcctgtaatcccagcactttgagaggctgaggcaggcagatcacgaggtcaggagttcgagaccagcctggccaatatggtgaaacccccatctcgactaaaaacacaaaaatcagccaggcattgtggcacgtgcctatagtcccagggacttgggaggatgtggcagaagaatcgcttgaacccgggaggcagaggttgcagtgagctgagattgtaccactgcactccagcttgggtgacagagtgagattccatctccaaaaaaaaaaaaaaaacctacactgaaaaaacacactaatatgaaacttcaaaacaataataagagaaatgtttactctcataaaacctggtatgcaacattgatgtatcattaaaaaaaacttgtcaggctgggtgcagtggctcacacctgtaatctcagcactatgggaggccgaggcgggtggatcacctatggtcaggagtttcagaacagcctggccaatgtggtgaaaccctatctcatataaaaatataaaaactagctgggcgtgatgacgtatgcctgtaattccagctgcttgggaggctgagacataagaactgcttgaatccaggaggtggaggttgcggtgagccaagattgcactactgcactccagcctgggtgacagggtgtcactccatctcaaaaaaataattaaaaaatatttgtctcagtaactgcagtatttagctgttactgtgtacttattaaatgcaggtattttgaatcattggcatgcactgtgtggcaatagaatttgagagaatatgcagtatagttataaatagattctaatgagaaacttttaataaaaaagcatttaaaaaactagagttactttttatgttttaaatatacattattcttacacaagatgaaactgctgaaatctaactttagaagcaaagaatagccttacttttttttttttttttttttttttttttttgagacagtgtcttgctctgttgcccaggctggagtgcagtggtgcgatctcggctcactgcaacctccgcctcccgggttcaaacgattcttgtgcctcacccttttgagtagctgggattacaggcgcctgccaccatgcccagctaatttttttgtatttttagtagagacagggtttcaccatgttggtcaggctggtctcgaacccctgaccttgtgatccacccgcctcggcctcccaaagtgctgggattataggcatgagccaccgcgcccgacctacattgttaaacatagaaaaaaaaaaatatatatatagatatatattttgcagaatagggttagaccctctgatgtgtaaaacatatattaggaaataaactatgttattatttagttataggctgaagaaagtagataaaaatcttataattccttattgcctgcagcaaacttaaatttataagtaactattttagtaaatatggagtgcctactaattatctcatttacttctggcataccatgcaaatcatctcacatctcacatctcttcatagtcaaaggtttttttttccttgctccagacaggtgatcaggtcttgcttagagacaacaatacctgttttattaaaaataagaaacataaatcttgctcgcattctctaattacaagctagtaatgtgctcggcagagaggatgtgataaaatagtctagtaaattaatacaaaaatactaagttataaaagaaatttctaaatatttagaaaatactttcaatttgtaggtttcttaattttactatctggtactattgaatcaaaaattggtggtggcaattagattttcaggtgcggcaacaatcaatattttatgccactaaatttctggaattgccactaatttacagtgaagaatacagctcaactcaggaatgtggaaagttaggattacgatgaaacatcttgaaattcttatctaaatgaacaaattttgaagattttctgggaaaaggggatctgaaactcttttatgcaaagaataaatgactaaaacacattctacaaaaatgagaaataaaacctttagggtatattatgaattatgtactcaagttatcctcaccaaggaagatcaggtttctgtagttctctaacatcacatccctatataaattccactgtgcagtgtccaggcaatgccactcctccagagagaattctatggccacgtctctaaattgcaatggtccctgaaacacacccacacacccacacacccacacacacatacatttttaccatgtggccatggacagaacttttaatttgacttaaggtgtaatgacaaagtaaagagaactggctctgacttatgggactgactaaaattatccaataaaataattttcaacacagaaatattctctaatgtattctctaactgagaaaaaagagcagcataagatccacaacatcagttcttataatgatatttttctagataataagtataaaattaagggcgtgaacagaacatgtgtatatatatattttttttttggagggggatggggtctcactctgttgctcaggctggagtgcactggctcaatctcgactcactgcaacctctacctcccccaggtgcaagagattcttctgcctcagcctccctagtagctaggattacaggcatctgccaccacgactggctaatttttgtatttatagtagagacggggtttcactatgttagccaggctggtcttgaactcctgacatcatgatctgttgggaacaggatccccaaaatctggccataaactggccataaacaaaatctctgcagcactgtgacatgtttgtgattgccatgatgcccacgctggaaggttgtgggtttaccggaatgagggcaaggaacacctggtccacccagggcagaaaaccatgtaaaggcattcttaaaccacaaacaataacatgagtgatctctgccttaaggacatgctcctgctgcagataactagccagactcattcctttacttcagcccatccctttatttcccataaggaatacttttagttaatctataatctatagaaacaatgcttatcactggcttgctgttaataaatatgtgggtaaacctctgctccaggctctcagctctgaaggctgttagaaccctgatttcccactctacacctctatatttctgtgtgtgtgtctttaattcctctagcaccgctgggttagggtctccctgaccgagctggtctcgggaatgatccacctgcctcagcctcccaaagtgctgggattacaggcatgagccaccgcacccagcctcacgaacgtgtatatttttcagtgctatattttcttcatatggaatgagttgtgaatatttttcagatggaaaagacatgttgtgttagaaggcacctctcaaattttaatatgtacagtaagttgaagaccttgttttgcaggtttcttttttccagaagatctttaataaagtctgatttttaaattaattaattaattgattgattttgagatggtgttttgctcttgttgcccagcctggtgtgccaccacacctggctaatttttgtattattagtagagatggtatttcaccatattggctagtctggtctcaagctcctgacctcatgatccacctgtccaggccccccaccaaactgttgggattccaggcatgagccaccatacctggcatttttagggaaattttattagaaaataaatatgtacacttagcaaggtaaaggaaatacaaattttacagccgggtatggtggcttacacatgtattcccagcactttgggaggccgaggccagcagatcacaagttcagtagtttgagacaagcctgaccaacctggtgaaacaccatctctactaaaaatacaaaaattagctgggcacagtggcaggcacctcacctgtaatcccagctactcaggaagctgaagcaggagaatcacttgaaccagggcagcagaggtttcagtgagccgagatcacaccactacactccagcctgggtgacagagactccatttaaaaaaaaaaaaagaaattataataacaattcttctgttcctaaatgtgccttcagatgtagaatcagaagtcacaacaatataaagaaagtggcctaaataaagcccaaggtgttggacacatctttttattgtaccaaccatatgatgcacaattcaattatttatccagtcgctagtgtagactaaaagtttctggattgtagaaactatgactgcttcatgtattttttttaatggccatgtgaaattgaagcaactagtttatctatttcggtcttcagatctcctccttctttattatccaagtaccaggaaactggagaaactctcatctgggtaccaaccaaagacacctcttgtatgaggggatgaacaaacacagatgactcatttctcatacactgagacagaagcagaattaaccactcttgtcagcctgacacaattctgcattgtacatcctcaaatgcctcaaagacacctaggtgattttgagggaattcccagtgaccctgggctgatagtccagtgataagccactctggagagactcaggctgattctaaatagaaaatggaactgccttggtggaactccagaacctggatcatttgtccttatttgctagctcttggataaaagaaagaacaaaaatactaatttttcaggtaaaatacaaaaatcacattttaaaggcaaatatagttgtggtcatggctctggatgttttgcggccttgatctctcactcctaagatgcttatttatagttacagattctgccatcagattctatttcctcctgggtcctctcacataactgtagcaggtgaacaagatatgaaaaatctcaaagaaccacactcccgaatgggggctgtaagatgtgtatgttgatatctcacaatgcagaaaatgccttttgttagttttctgtacattctttatccaaactccggcccttatttgtaaatccgaagcagagcccagaccttatctgcagattctaggtaggatccacctggctctgcatcctttggtgttacagcaagtggagtacaatcaaagaagagatcccctcatagaggctgctctagcacattctaaatgataagtctacatgaaaaaaaaaaagctgacacaagatgaatgtaagtactgtcaggcctctgagcccaagcctagccatcgcatcccctgtgacttgcatgtatacgcccagatggcctgaagtaactgaagaataacaaaagaagtgaaaatgccctgccccaccttaactgatgacattccaccacaaaagaagtgaaaatggccggtccttgccttaagtgatgacattaccttgtgaaagtccttttcctggctcatcctggctcaaaaagctccgccactgagtaccttgtgacctccactcctgcccgccagagaaaaaaaccccctttgactgtaattttcctccacctaccgaaatcttataaaacagccccacccctatctcccttcgctgactctcttttcggactcagcccgcctgcacccaggtgattaaaagctgttattgctcacacaaaacctgtttggtggtctcttcacatggacgtgcatgaaaagtacacagtttatttgggtcaagtttatggattacaacctgagagcaaagattcaagttgtctgaaacctctactgtgatcagcagcagttacaggaagatttgtaaagacaacaagagaggaacagagagtgggctgatacaaagttgattgtcagaaattgttatttatttacagaaataacattgattattaattagatatatatcattatggtttagggtatgggatatagtgtccaatgtggcattattagtttaatttttacctacctgtgccaatagtgaacagtttcaagagatgaatatatagttcaaaggggggagaaatacataactacactttcttttaactctctctgagtttgaagttcgtagaaatgtgatttagcctctctagaagtgactgtagaggactgtaagtaccaactaggcagatacacaattctgtctgcatatttagggaacagcatgcactgtgctacacaactgtcagttgactagaatcctcagagagaaagtcccttttagagtacattctggttggcaccttctgtgtgtacatcatgtctggtaattctagacagtgtttggaaacattaattaaaagaaaaatattctccatccccagagaaactccacaataatagaacagaaagaaaatggttttattacacaattaaacttgaatgtgacatgcatcatcatcagtctgcttaacagatcgcaaaaacataaagatggtcaccataattagtccacaagtagaagaatttacagcaccatgtcatacatagttcatgctaaattcacctggagaatgatgaggccatttgtgtatgctaattgcttatattcaatgacaaataaacttttcccatcttcattgatgcaataacatcgataaagctggagatcattattcttagaaaactaatgcagagcctgggcacggtggtttatgcgtgtaattccggcactttgggaggccgaggtgggtggatcacctgaggtcaggggtttgagacaagcctggccaatatggtgaaaccccgtctctactaaaaatagaaaaattagccaggcatggtggtgcgtgcctgtagtgtcaactacttgggaggctgaggcaggagagtcgcttgaacccgggaggcagaggttgtagtgagccgagattgcaccactgcactccagcctgagtgacagagtgagattccatctcaaaaaaaaaaagaaaatttttttatttatttacagaaataacattgattattgattagatatatatcatatatcatatatatatcatatatcatatatatatccttatggtttacagtatgggatatagtgtccaatgtggcattattagtttaatttatactactcgtgccaatagtgaacagtttcaagagatgaatacatagttcaaaaggggagaaagacataactgtacttctattttaatgtctgtctgagcttgataacaaaaagacttccatttttcagacaaaagttttttatttcccaaatctcaagacctcaattcaaaatttggagctacagatttagagcctgaattgctggagttgcagcaggtgttacctgcacgtttgttgggattttagcatgaggaggaaggggaaagtggagattctcatgtctacatgtctactcaatgcacacatgttattctgattaagtttctgggctttatagtatctgaatcagtttcaggtctaaagacacaagagtcagtgaaagaggtaaaataattgattgctactctctgaaacttggagaaatgtggtctagcctctctagaagtgactgtagaggactatagataccaaatcagcagagacacaattctgcctgcatatttaggggatggcatgcactgtgctacacaactatgagatgactggaagcctgagagggaaactctcctctagagtaaattctggttgacaccttatgtgtttatatcatgtctggtaattctagacaatgtttgcaaacaatccttaaaagaaaaattgggctgggcatggtggctcactcctgtaccactgcactctagcctgggtgacagagtgagaccttctcaagaaaaaaaagaaaacagcaaaaaagaaaaattttatccagccccagagaaactccacaataatagaagagaaagaaaatggttttattacacaattaaacttgaatgtgacatgcatcatagtcaatctgcttaacagttcacaaagacagaaggatggtcaccataattggtccacaagtagaagaatttccagcaccatgtcatacagggttcatcctaaattcacctggagaatgaaaaggccacctgtgtatgctaattacttacattcaatgacaaataaatttttcacatcttcataacaggaggtagttttgcagcttgaagccaagtgcctgctgaaggtaggctttcactctgctacaaaaaagtttcagtaggattctatatttttggctatttacattttagagcagtggctctgtactcactggcacttggctacagcactcctgcttgctttctcctggttgctagtgtcctctattcacctctaccatctgccactgaggcacagccaacagcacagctcacattttatgtgaaccccatttgccacagcagcactctagtgtcacatgagcgagtgaggcctgagctgcaggaggagagcctgcaggcctcatgggtagaattacaccttcacaataatggaaatgggagtagtgtttcagcctcagtttccacttataatggtgacaaggaaaaaatactgctgaatttccagcctgagtccagatagagatagctccaaaagttctcactgtgacagcccaccccattcagacaccatgggatactaatactaacagggcttctgaaacagacaaagcattggagagaaaaacagatctccatctgagcgagattattttgagagaagaaagttaaaaagattttaagaaaaagctcagattagatatgagattgatcaagtcagtcagaaaatattcccttaaaagaaatttctgtctaaacacccaaaccgcacagctactctcagcatgagaaacatgagcaatatgaagaaaggtggcagaatttcagaagaattttataaagtttcttttcgatctctgctgctttctcatctcctagccattgaataggggttctatctcttttttaccctctctctttttgaatgtattcaacaacgtttactttggtaatagtgcattatcaatactaaagctaattttaataacactttataaataaataaaatttgtcaattttgaccactccagatttacatatatattttgtaatctcttgtaattttttgtctgtatttcatttttatccatattcttttttttaaactatatttgtaatgctttatttcttttttttttttttttaattgatcattcttgggtgtttctcgcagagggagatttggcagggtcataggacaatagtggagggaaggtcagcagataaacaagtgaacaaaggtctctggttttcctaggcagaggaccctgcggccttccgcagtgtttgtgtccctgggtacttgagattagggagtggtgatgactcttaaccagcatgttgccttcaagcatctgtttaacaaagcacatcttgcaccgcccttaatccatttaaccctgagtggacacagcacatgtttcagagagcacagggttgagggtaaggtcatagatcaacaggatcccaaggcagaagaatttttttttttttttttttttttttttttttgagacagcgtctggctctgtcgcccaggctggagtgcagtggcgcaatctcggctcactgcaagctccgcctcctgggttcacgccattctcctgcctcagcctctcaagtagctgggactacaggagcccgccaccgctcccggctaattttttgtatttttagtagagacggggtttcactgtgttacccaggatggtctcgatctcctgacctcatgatccacccgcctcggcctcccaaagtgctgggattacaggcgtgagccaccacgcccggccgaagaatttttcttagtacagaacaagatgaaaagtctcccatgtctacttctttctacacagacacagccaccatccgatttctcaatcttttccccacctttcccccttttctattccacaaaaccaaccttgtgatcatggcctgttctcaatgagctgttgggtacacctcccagacggggtggtggccgggcagaggggctcctcacttcccagtaggggcggccgggcagaggcgcccctcacctcccggacagggcggctggcctggtgggggctgacccccacctccctcccggatggggtggctgccgggcagagacgctcctcacttcccagacggggtggctgccgggcggaggggctcctcacttctcagacggggcggctgccaggcggagggtctcctcacttctcagacggggcggccgagcagaggcgctcctcgcatcccagatggggtggcggggcagaggcgctccccacatctcagatgatgggcggccgggcagagacgctcctcacttcctagatgggatgacggccgggcagagatgctcctcactttccagactgggcagccaggcagaggggctcctcacatgccagacgatgggcggccaggcagagacgctcctcacttcccagacggagtggcggccgggcagaggctgcaatctcggcactttgggaggccaaggcaggcggctgggaggtggaggttgtagccagccgagatcacgccactgcactccagcctgggcaccattgagcactgagtgaacgagactccgtctgcaatccagacacctcgggaggccgaggctggcggatcactcgcggtgaggagctggagaccagcccggccaacacagcgaaaccccgtctccaaaaaaaaaatacgaaaaccagtcaggcgtggtggcgagcgcctgcaatcgcaggcacttggcaggctgaggcaggagaatcaggcagggaggtgcagtgagccgagatggcagcagtacagtccagcttctgctcggcatcagagggagaccatggaaagagagggagagggagaccgtggggagagggaaagggagagggagagggagagccattctttttattttttcaatttgaaacaccctttaagtaatttcaaactgttataggagatagaaagaaatcatttttgggaggccgaggcaggtggatggatcacttgaggtcaggagttcaccaccagcctggacaacatggtgaaatcctgtctctgctaaaaacacacacacacacacacaaaatttagggagtgctggctcacgcctgtaatcccaacattttaggaggccgaggtgggcagatcacttgaggtcaggagttcaagaccagcctggccaacatggtgaaaccccatttctactaaaaatacaaaaaaattagctgggtgtggtggtgcatacctgtagtcccagctactatggaggctgaggcaggagaatcacttgaacccagaaggcagagtagtgtaactgcccaaggggttcaccttgccctttgcctagacagagccaattcatcaagacaggaaaatttgtggaggaaaagttaaatattaaatttgaactcaattgaaaatggacacaaccaatggtcaccaagtcctggaacaggttgtgtgagccccttgatgcattcatccagcactgttttggagatatctctatttcaatctattccttttttttttttttttttgagacggagtctcgctctgtcacccaggctggagtgcagtggcgggatctcggctcactgcaagctccgcctcccgggttcactccattctcctgcctcagcctcccaagtagctgggactacaggcgcccgccactacgcccggctaattttttgtatttttagtagagacggggtttcaccgttttagccgggatggtctcgatctcctgacctcgtgatccgcccgcctcggcctcccaaagtgctgggattacaggcgtgagccaccgcgcccggctcaatctattcctatatattagttgttgaaaaacaatagagaattgcaaaagcaagttgacttttttgtgttgcttgagcccaatcatgaacgactctcttgactgggccttatgccaaacaactcattaccaaagagctagggtcccagagtgtgcccaagcttcatgagacctctcctcatctgtgcatagatgagtgtctgattctggagcccagactgttgcttcccactctggtggtgaatcctccatagtctggcgagcataatatatatatctcttttcccttctcctctttccattgcaatttgcttattgtatcaatctgcttatttcattgatttgcttatctcatttgcttattatatctgcatttccatttatgtaggataaagcttgttgacctttaaaggtattgtgtgtgtgtcttttcttctccccttgcgcgtttcccacacagaacatttttggcatcacaaacaggatttgaaaaccaaactgccacttttttgccacaatgacagagctggaaactcgaggaattcccatatccaggaatgggaactcccccagttctcacctttggggactgaatggttaaggggaactggtctttgtgggaactgagaatctaaattagtgcaatttaaacctttgactgtgcgggaagtgctgcaggggattccagtgagcaaaggagatgctgagggatctcccggagtggatggtgtttgcttactgcttataagttaatgtatcaagataggggctggttgctacaagagaaaaggtaagctggaaaaaaaaatgctaatccgacttccagactgaccctggcccaaagccaggcctatgtcttgactgatcaggctcaaagatatcagcctattgatgaaaaaagcagctgtcccaatggtcttatcagggtaaaattgaagaactaatcagctggggcctggagcaggtaaaaacccagctcttatctcaaggataggaaattaaccttagtaaaattcaaggacaagcacaaactgtaaaattcctcggcattctatggaatgcagggaaatagtccattttaccaaaggccaaggctaaaatactagaatttgcaacccctaccactaaaaaggaggcccagaaatgtattggcttgtttggattctggagacatgatattcctcacttgggtaacattttacaacctctgcatgcagccactagaaaacgctatgactttctttggggagagaaagagagcatggcttctgaacaagctaaacaagtgggtcaactggccctgggtctatgacctgtacggggtgggccagtagaactgcaagtaactgtcctaaatcaacatgctaattggagccttaggcagaagcaagatgggaagagggtacctttcaggttttggaaccagaaactgccagaggatgacaaagcttatacccgtttcgagaagcaattgttagcttgctattgggttttgctggaaacgaaacacctctgcttcaaccatgatgtctttatgaggcctgaaattcctactatgacttgagtcatgggttcccccaaaactcaccagatagggcatgcccaagaaagtagcatcatagaatggaaatggtatgtacaagagcatgctaagccaaagccaaagcgtatcatttttacatgaggatgtgcaaaacttgccagctcgggagatcaccaaggaagtcctgcaggtagggaaggaaacctcccccacccaatggggcaactcctttaaagtgtaaagcccaatcttgtattaacacgaatagactttcccttagatacctaaccttgtttttaacatgaatagactctcccttagctgagagaaccggaagaactccatttggctccttcatttacaagacatcaagtgctccttacccagcccctttcctcaaggacttaacttgtgcaagctgactctcaatatatcaaagagtgcaattaactgataaggtgctgaggcaagcgaagtccgctggaatttgctcggagatggtgccataaagcccccgcattttgtccggtagataacacgcagagcccccgcacctatcactttgtgatgaaataaaagcccctgcacctggaactgtttgttttcctgtaaccatttatctttttaactttttttgtctgtttttcttctgtaagattgctgcagctagaattccccctcccctctgtaaacccaagtataaaagaaaatctagccccttcttcggggctgagagaatttcgtgcgtcagccatctctcggtcgccggctaataaaggactcttgaatttgtctcaaagtgtggcgatttctaactcgctcaggtacaacaaaagaactaagcctagaggatcagaaacatgcttgatttatgatggatccaccaaatacattggtgggacccgatgctggaaggctgtggcttataaccctgttaaaaaggtaagcacttctgatgaaagaaggggtgggagcagcaagttagctgaactagtagccatcctctgagctatacaggaggaagccagagggatttgtcacttttttcatgcgcgtccgtgtgaagagaccaccaaacagtctttgtgtgagcaataaaagcttttaatcacctgggtacaggcaggctgagtccaaaaagagagtcagcgaagggagataagggtggggacattttataggatttgggtagataaattacagtcaaaggggggttgttctctggtgggcagagtgggggtcacaaggtgctcagtaggggagcttttgagacagggtgagccaggagaaggaatttcacaagacaatgtcatcagttaaggcaggaatgggccattttcacttcttttgtggtggaatgtcatcagttaaggcaggaacaggccatctggatgtgtacaggtcacaggggatatgatggcttagcttgggctcagaggcctgacaacttgtataccaacactttatcagtagcaaatggtcttactacctggatgctccaatggtaatgaaacaaattgttaattgggaataaagaggtttggggaaaacaatactgggaagatgtctgaatcctggcacacactaccattattgctgtcttccatgttgatgcccatgcatctctgctttctcttgacagactatttaatcaccaggaaaatcaacaggccaaaatttttattataactgcaaacttgaatgcagatgaatggattacaacgtgtttcaagccttgcaatgacaggcattataatggatggtggtataatttatagcgattagtggcctaaatgtgccacttaaaagatacagaatggtagaatggataagaatttaccaaccaaatatctgctatcatcaagagactcggccgggcgcggtggctcacgcctgtaatcccagcactttgggaggccgaggcgggtggatcatgaggtcaggagatcgagaccatcctggctaacaaggtgaaaccccgtctctactaaaaatacaaaaaaaattagccgggcgcggtggcgggcgcctgtagtcccagctactcgggaggctgaggcaggagaatggcgtgaacccgggaagcggagcttgcagtgagccgagattgcgccactgcagtccgcagtcccgcctgggcgacagagcgagactccgtctcaaaaaaaaaaaaaaaaaaagagactcacccaacacataaagactcacataaacttaaggcaaagggttggaaaaagataatcatgcaaatgtaccttaagagcaagcagtagtcgccattcttacatcagacaaaacagatattgaaacaaaaacggttaaaagaaagacaaagagggacattatataatgataaagggacaggaaactatcacaattctaaatatatgtggacctaacactggagctcccaatttattaaacaattactactagacctaagaaatgagatcaatgtcaatacaatgataatggggaacttcaatactctactgacagcactagacaagtcatcaagacagaaagtcaacaacaacaacaaaaaaacaatagacttaagctatagcctagaacaaatggacttgaaaaatatttacagaacattctacccaacaactacagaatatacattttattcctcagaacatgaaacattctccaagatagacatatgataggccacaaaacaagtctcaatacatttaagacaatcaaaattatatcaactactctctcagacaacaatggaataaaagtgaaaatcaacttcaaatgcaccctcacaaccatgcaaatacacggaaattaaatgaaaaataaaatttaggatcaacctgtttctgaatttttttgtatgaaatcaagatggaaatttaaaaattaattgagctgaatgataataatgacacaatctatcaaaatgtctgggatacaccaaaagtggcgttaaaaggaaagttcatagcatcaagtgcctacatcaaaaagtctgaaagagcataagtagacaatctaaaataacacttcaaggaactagagaaacaagaacaagccaaacccaaacccagcataagaaaagaaataacaaatatcagagcagaaccctagggggaggggtggctgcagtctctgtggacaagcagacttagcctttcctcctgctagttctgagcatttccagcagctcagatgagtgtatttgcccccagcaaaacactcctcctccaccaaacgacagtcaaagtgcttcattaaaagggttcttctccccatgcactggatgagacccctcaacaggggttgtcaggcaccctatacaggagtgatcctactggcttcaggttggtgcctcttgaggtcagagatcccagaggaaggtgcagacactcttctttactgctctgcagcctccttgagtgacctctccaggcactggagtgaaccagatgaatagggcctgaggtgaacccctagcaaggtgcagcaaccctacagaagagggacctgaccactgaatgaaaaacaaacaaacagaaagcagcaacaacagcatcaacaagaaaaaaatatacccagaaaaatcccacccaaggctgcacatggtggctcacaccataatccaaatactttgggaggttgaggcgggcagagcacttgaggtcaagagtttgagaccagcctggccaacgtggtgaaacctggtctctactaaaaaaaatacaaaaattagccaggcgtggtggtgcacgcctgttgtcccagctacttgggagtctgagacatgagaatcacttgaaccttggaggcggaagttgcagggagccaagatcctgccactgcactccagcctgggtgacagagcaagactctgtctcaaacaaaacaaaacaaaacaaaaaaatccaagggtcagcagcctcaaagatcaaaactagacaaactcatgaagatgagaaagaatcaacaaaaaaacattgagaggctagagtgcctcttctccaaatgatcaaaatgtttcttcagcaagggtacagaactggacagaggatgagatgcaggaattgacagaagtaggcttcagaagatgggtaataaaaaaactctgctgagccaaaggaacatgttctaacccaatataaagaagctaagaaccttgataaaaggttagaggagccgggcgcggtggctcacgcctgtaatcccagcactccgggaggccgaggcgggcggatcacgaggtcaggagatggagaccatcctggctaacaaggtgaaaccccgtcactactaaaaaatacaaaaaaaattagccaggcatggtggcgggagcctgtagtcccagctactcgggaggcagaggcaggagaatggcgtgaacccgggaggcggagcttgcagtgagctgagatcacgccactgcactccagactgggcgaaagagcaagactccgtctcaaaaaaaaaaaaaaaaaaaaaggttagaggaactgctaactataataacaagtttggagaggaacataaatgatctgatggagctgaaaaacacagcacgagaacttcatgaagcatacaaaagtatcagtagccgaactgaccaagcagaagaaagaatatcagtatttgaagaccaccttgtcaaaataaggcatgcagacaagattaaagaaaaaagaataaaaaggaacaaagaaagcctctgacaaatatggtgttctgtgaaggaaacacatgagggtagaagaaaagacacctacacaatacctttaagggtaaacaagctttatcccacataaatggcaatgcagatataagtaaattttttttttttttttgagacggagtctcactctgtcacccaggctggagtgcagtggcgcgatctcggctcactgcaagctccacctcccgggttcacgccattctcctgcctcaacgttctgagtagctgggaccacaggcacgtgccaccatgcccggctgattttttgtatttttagtagagacggggtttcaccgtggtctcgatctcctgacctcctgatccgaccgcgttggcctcccaaagtgctgggattacaagcgtgagccaccgcgcccggccaagtaaattgatataagaaaattgcaatggaaaggggagaaggaaaaagatatatatatatacacacacacacacataaatatatatatatacacacatataaatatatatatacatacacacataaatatatgtacatatatatacactcaccagactatggaggattcatcgccacaccggaatgcaacaacctgggctccagagtcagccacccatccatgcaaggacaaggagaggtctctttaagctttagtgcgttctggggctctaggtcattttgtaacaagttgtttggcatgaggcacagtggagggcccttgagactgggctcaaggaacacaaaaagttaacttgtttttgcaattggctattgtttttcaataacaatataaaggaatagattgaaatcgagatttctctgaaacaactctagatgaatgcatcaaggggctcgcagaacctattctcaggcttggtgaccatcgtttgtgtccacattcaattcaattcaaatttaactttttctccacctttggcctcaattggatactcaattgtaggaaaatacccttacagatacatagggaaggcatagtcgatatagattacagatacagggtaaggacaggagaattaaaagcacaattaataaaaaccacacccagcatggctttctaaggagagtcatattgtgagaattgccagggatatacacaccacatttagcatgcaatatggcacaaatccctccttgggctgcggtaagcatatctaatgccatttgattttgcaacacaacagtactcagctgagcaaatttatctggtaacaacataagtctagtgctaatatcattaagagctttttctacatataaccttaatattttagtttgttgctgaagcaggattgtaccagtggcaggggagaatactgtgatagggtactgccaccagggaggccagggaggctggcacattcataaccagtgatgtttgtaagtatctaaattacttgggagaggaatattaacccggatggtgaatggaattaatggctatccccaagttcatctccctgtccagtgtggggacaggtatcaccactcataggatctgcatacccagagggctcccccaggggacagcaatggagctactgtaatcacagtgtactcatgtattattaaagtaggaaagagattgtggttcactgggggcaatgttgatttggagtatgtgttgacaattgtctggagaaaccccagagtaatattagaggaaccttttaaggcctccagactaagcgggggctatagggaatccaggcaccagcacagctggtttccaaaatataccattccaggaatattgggcaggataccaaggcttttgatgaaaggagaatgtggagttcaccttttgtctgacttgggcaaagatagattgcttagtgtggtcaaaggaagtacaggttggactacaagtgttgttgtgaccccgttggtaactacatagccattcagaaatgttgtcaggatgattctccaaggtagcccattcctggcggcctttggcaactcgacgtatagaaaacattgtctgtgattggcttctattgcagcggtggctacccagttcatgaatttattcttggcctcagacacaaagacacaggtgctgaccattagtagatagattattccctgtaataacaaaaaaggataggaacatcatattgtttttcatctttaggaaattgtactatgccttcattttctgttttcacagctacaaggtcaccagacttaggggtgggatctgatggatgctgtacccatatattggctccaggatttaagctacatgaaccagtggatctgaatccccgagttctgtatgtagcctctgttgggacagagatttcctcaggggttaattgttgacaaggtaccactaataattgagcaacccacatttgtggttttatagcaaaagaatctggagtggtattgtataaaacaacctttaactctccccagtaatcaccatcaattataccaccaaacactataatgcctctcattgcaaggcttgaacacattgtaatccattcatccacattcaaatttgcatttatggtggaaattttggcctgtcgatcttcctgctgattaaatagtctgtcaagaaaagcagagatgcatgagcatcatcatggaaaacagatccaggagtggtggcccaagcctgtacttctaccaatttgggaggctgaggtgggttgttcacgaggtcaggagattgagaccaccctggtgaacacagtgaaaccccgcctctactagagaagtacaaaaattagctgggcgtggcggtgcatgcctgtaatcccagctactcgggaggctgaggcaggagaatcacttgaacctgggaggcagaggttgcagtgagctgagactcagccactgcactcaagcctggtgacccgagactgagccactgtactccagcctggtgacagagctagactccgtgtcaaaaaaaataaattaattaatacaggaaaacaatgataatggtagtgtgtaccagaattcatgtatcttcccagtattgttttccccatacctctttattcccaattaaccatttgttttgttgtcattggggcatccaggtagtaagaccatttgctactgagcaagagttggtatacaagtgacaaatccttcttccttcctttcgaagagctcagaggatgtctactagttcagttaactggctgctcccacccctttcttcatcagaaatggttatgtttttcggttgtttgtttttgagatggagtctcagtctgtcacataggctggagtgcagtggtgagacctcagctcattgcaacctctgcctcctgggattccagtgattctcctgcctcagccccctgagtagctgggattatagatgcatgccaccacacctggctagtttttgtatttttagtagagatggggtttcatcatgttggccagcctggtctcaaacttctgacctcgtgatccacacatcttggcctcctgtggattttgagggaactcgtgacctaaatcataacaggaaatttaggcctcataaagacatcatggttaaagcagaggtgttttgtttccagtaaagtccaatagcaagctaacaattgtgcacaggtgaggagagctgtcacgaagctttggcgcagtctgggaccctagctcttttgtaatgagttgtttggcacgaggcttagtcatgaggacccttcgcgactgagctgaagaaacacaaaaaggtcacttgtttttgggattgtctgttgtttttcaagaacgaatgtataggaatagattgaaatacagatttctctgaaacagcgctggatgaacgcctctaggggctcacacaacctgttcccggacttggtgaccattgtttgtgtccacgttcaattagcacaaatttattatttaactttgactccacaccagactatggaggattcaccaccagaccggaaagcaacaggatgggctccagagttggccacccatcggtgcacagaccaggagaggtataatgacgcttctgcgcggtctgggaacctagctctttttgtaacgagttgttcagcatgaggcctagtcaccagggcccttcatgactggtctcaaggaacacagaaaggtcaacttgtttttgtgattgtctattgtttttctttttctttctttcttttttttttttttttttgagacggagtctcgctctgtcgcccaggctggagtgcagtggcgcgatctcggctcactccaagttccgcctcccaggttcacaccattctcctgcctcagcttcccgactagctgggactacaggcgcctgccaccaggcctggctaattttttgtatttctagtagagacggggtttcagcgtgttagccagcatggtcttgatctcctgacctcgtgacccgcccgcctcagcctcccaaagtgctgagattacaggcgtgagccaccgcgcccggccttgtctattgtttttcaataacgaatgtataggaatagattgaatagattgacatagagatttctctaaaatagcactggatgaacgcctcaaggggctcacacaacctcttccaggacttggtgaccattgtttgtgtccacgttcaattgagttcaaattaaatatttaacttttcctccacaaattcccctgtcttgatgaattggttttgtctgggcaaagggcaaggtaaactccttgggcggttacacaacctccacctcctaggttcaagagattctcctgcctcagccttcggtgtagctgggactacaggtgtgcaccagcacgcccaggtaaggttttgtatttttagtagaaatggggtttcaccgtgttggccagggtggtcttgaactcctgacctcaagtgattcgccctctttggcttcccaaagtgctggaattacaggcgtgagccaccgcgcctggccctaaatgatttcctttctgtctcctataacagtttgaaattacttaaaagttgtttcaaattgaaaaaataaaaagaatgtagataaaaataaaatataaaaagttaaaaaaattacattagattacaaaatatatatgatgtatatgtaagtctcgagaggtcaaaaatgacaaatttgatttacttacaaggttttattaaaattagctttcgtattgataatacactattaccaaagtaaaagttttctcttgaacaaaaattttttgtattattaatatgacagccaaatacttctgttcaccttttgaatacattcaaaaagagaaagagtaaaaaagaattttcccatgctctccggtgggcctggctcagctcaaggaggaagcccggcctgaaaaggctgcagctgaggctgtgactctttcttcactcagcccagcatgtgatcacatcttctgtcactcagggactgaggaggcggggccttaagcattatccaatcagggacgctgggttggaaaccgtccaatcatgcaggcagctggagcgaagaggaaggctttcgggtttggcgcggccatttgtctcttgctgcagctggtgctccaaatctggtcttagctgcttcgtgtcttcttctccagcctctgtggccctgtgacctgcaggtattgggagatccacagctgagggacccccggaagcctagaaatggtgagagtgcctttccagcattccgagagaggggagggactggttggaaccgatgggaagtggctgtggcgggacttaggcctccccgcagtcagctccacaatctgcgaccgacttctccttgcccagttcggcctcagtccccttcagccataagatggcaacagcgccgacagccgggccccgcggcgtcctgtctcttccctgccctggcctggagccctctctgggcagctctgcacccacagcgctgcgtctctcccagattgtgcagggagcacgggagggttctcgggggagaatcctgactcggggtgcaggttcatgaatgggaagagctttggtccatggggttgacagtttctcttttctcctattaaaaacttatggggccggtcgctgtggttcatgcctgtaatcccagcattttgggaggtcgaggcgagcggatcacttgaggtaaagggttgttagtacaacgtagttcttcttcaaagacgcaacttcctggtcataagttggaaaagttgtaaatcacccctaccccttcttctcccttctccttttctcacaaatcgcgcattacccgatttggaaaaagcttgagtgtaagccaaccgggatcagcttagattgtgcggtctgaccccagccaatggagggaaaacaaaaacagaactgcattagggctaataaccccttcccggccaggcgcggtggctcctgcctgtaatttcagcactttggggcgccgaggcgggcggatcacgtggtcaaatttctagaccagcctatccaacgtggtgaaacctctctctactaaaaatacaaaaattagcctggagtggtgccaagcgcctgtaatcccagcaacttgggaggctgaggcccgagaattgcttgaactcgggaggcagaggttgcagtgagctgagatccctccatcgcgctccagcatgcgcgacagagggagagtcctcaaaaaaaaaaaaaaaaaaaaaagtaagcatcttaaaatttccatcctttatgtaaacactgtgttttagtaacttcactgtattttccaacacttagtttcaaaaacccagtgaataactctggcatggaaattaaagcttgaacctagtgattccgagctaaggctaatattaagcctgcaaaaggagggttttttttttttttttgagatggagtttgtccaggcagatgcagttaagattaagatgaaaggaaactggatgggtcttactgataatgatgttattgttttgaggcacttgtttgactttgtaaaataaaaacgttagatttatggaaaaaaatgaattccaaaaacatattgcaacaggaggaagtaccaacaaagtataacgtctttatggcttgcaaaaacgtaggcagaaaagtgctttcttccctagggaggagcaaagaagtttagaaaggaggtgggaggggaatggcaaatggagggtgcaaaagtcagattttatatcagagaatgtcttactctgaaatcagcatgttcttaggagggatgtaaaatgtggttgtatgttgactcagactgagggtagctcaaagttcaggagcttgagggaggcatataagcttaagaaaagtttcattgagaaatattttgttttaggccaggcgcggtggctcacgcctgtaatctcatctgctcggccaccctgtcccggccctgaagcgatgtaagcaagaagctgccctgctggaactgctccttcgggagactgctgattttggcattctttttcctttcatcgtatttcctctttttttttttttttgagatgaagtttctctcttattgcccaggctggagtgcaatggcacaatctcggctcactgcaacctccgcctcctgggttcaagcgattctcctgcctcagcctcccgagtagctgggattacaggcatgcaccaccacacctggctaattttgtatttttagtagagacagagtttctccatgttgaggctgcaagaattgcaggtcagcaagaattgctgcccaggggcagcacataatgggactagtaccaccgtcctgacggtgtgctgttgatgagcacgatgcaattcttcaccagggtcttggtacggactagctcgttattagatgtattgtagacaacatggacgatccttgttttaccagtacaacactctgagccacaggagaaattcccccgtccagcctcagggcaccgtatttcttcttacctccccacaaacggactgtgtggatgcggcgggggccaatcttggtgttggcagccgggcgccacaactcatccttctgcttcttgtggtagggctttctcttgcccctggacttgcagcgtttgtgccagttgtcccaagagatgcccatctctcagcgctggctggaaagagttctcttttctttgatctatgcatttcttccatttggcttttcctgggccacatcttatacattaaaccggtaaacatcactacagtgttttcctgagttctgtgaatagctctagcaaattatttgggtgtccccaattttcaaacaataggtgagaagcatagatgggccatggggtttgtgactggcatctgcagtgaggacaatgttgtgggactgagcactgaaacggggtctgtgctgactctgggtggtgtcagatttcaaatgttagataatgagttgttgttggagagttgtttgacgttcagcaaactctgcagatttggtgccagcaaaagatatcacggaggcctggcctggaataaaactctgggtgtttgggaataggaggctctcctgtacacaggctgtcacactgcccattgtcctgtgattccagatcttctcccagggtgacagaggactgaaaacttagaggaaaagagctctgatgacagacaccccccttttcttgcaagtgccacaataggattcccacctactcacaaacacacacactagacatagacgtgcccatactcctcccaggactaggcaccaccttcaggaacttcattatgccatttttttttctttttctgagacagagtcttgctcttttgcccaggctggagtgcagtggtgccatctcggctcacttcaacctctgcctcccaggttccaacgattcttctgcctcagcctcccaagtggctgggattacaagtgagtgccaccacacccagctaatttttgtatttttagtagagacttggtttcaccatgttggccacgctggtctcaaaatcctgacctcatgatccacccaccttgccctcccaaagtgccgggattacaggcataagccatcgcacccagccagcatttttgatcctagtgtttcttgccaagaacccacaagtgtctacaagtctcctggcatatccccacccccagacactgaatctgcagcagcaacctattttctccatcaacctaaaggtctggacctcctctttataatctcatctgcctgcatgcatacagaaataaatcagagtgtggccccacctgggccactatctgtagcgaaaatcagtctgttcatctacattgcagtctttcccacacagggatttgttttttttctttctttctttcttctttttttttttttgagatggcgtctcgctctgtcatccaggctggagtgcagtggcgagatctcggctcactgcaaggtctgcctcccaggttcacactattctcctgcctcagcctgctgagcagctgggactacaggcacgtgccactacccccggctaattttttgtatttttagtagagacggggtttcaccatgttagccaggagggtctcgatctcctgacctcgtgatccacccgcctcggcctcctaaagtgctgggattacaggcgtgagccaccgcgcctggcctgtttttttttcttgtagcttttatttttggtttagggtacacatatgggtttgttatacagctaaaattatgtcatgggggtttggtgtgcagattttatcactgagatactacgtatagcaccaaacatgtctgttttctgatcctcatggtcctcccactctccaccctctactaggtctcagtgtctgttattctcctgttgtgttcatgtgttcttattatttagctcttacttataaataataacatgcatttggttttctgtttctgcatttgtggggaaaagagagatcagactgttactgtgtctatgtagaaagaagtagacataagagactccattttgttctgtactaagaaaaattcttctgccttgagatactgttaatctgtaaccctacccgctaccctgtgcttgcaggaacatgtgctgtgtccactcaaggtttaatggatttagggctatgcaggatgtgctttgttaaacaaatgcttgaaggcagcatgcttgttaaaagtcatcaccactccctaatctcaagtgcccagggacacaaaacactgtggaaggccgcagggacctctgcctaggaaagccaggtattgtgcaaggtttttccccatgtgatagtctgaaatatgacctcatggcaagggaaagacctgaccatcccccagcccgacacccataaagggtctgtgctgaggaggattagtaaaagagaaagtcctctttgcagttgagataagaggaaggcatctgtctcctgctcctccctgggcaatggaatgtctcagtgtaaaacctgattgtatattccatctactgagataggagaaaacccccttaacgctggaggtgagacgtgctggtggcaatactgctctttaatgcaccagatatgtttatgtatgtgcacatcaaaacacagcacattttctaaccttgtttctgacactgagacatttcttcacgttttcctgctgacccttcccccgctattaccctattgtcctgccacatctccctctctgagatggtagtgataatgatcagtaaataactagggaactcagagactggtgccggtgccggtcctccatctgctgagctcttgtcccctgggcccacttttctttctctatactttgtctctgtgtctctttcttttctcagtctctagtcccacccgatgagaaatactcacaggtgtggaggggcaggccacccctttagcattagttttcttttttttttgttttttgttttgttttttgagatgaagttttgctcttgttgcccaggctgcagtgtaatgttgcgatctcggctcattgcaacctttgactcctgggttctagcgattctcctgcctcagcctcccaagtagctagtattataggcgtgcaccaccacgtttggctaattttgtgtttttagtagcaacagggtttctccatgttggtcaggatggtcttaagctcccgacctcaggtgattatcccacttcagcctcccaaagtgctgggattacaggcctgagccaccacgcccaggctctgcattagttttctaagaataatgatctccagcatcatcgatgttattgcaaaggacataatcatttcttttaatggccacagagtattcatgatgtttatgtatcatattttgtttttactaaatcttttatttttggagacagggtcttacttattgttcaggctagagtgctgtggcatgatactgacatacattagcctgaacctttcaggctcaagcaattctctcctacctcatcctcacaagtagctgggactacacatttgcgttaccacccctggccaatttttctttttgtattttttgtggagacaggattttgccatgttgcttaggctggtcccaaacttctaaactcaggcaatccaactgccttggcctcccaaaatgctgggaggacgggcatgagccaccacatttgaccataccatattttctttttttttttttgagacggagtctcccaggctggagtgcagtggtgcgatcttggctcactgcaaactccacctcccaggttcaagcaattctcctgcctcagccttctgtgtagctgggactacaggtgctggccaccacgcatggcaaattttttttgtatttttagtagagacggggtttcaccatattggtcaggctggtctcgaactcctgacctctggtgatccgcccgggtcagcctcccaaagtgctgggattacaggcatgagccactgcgccaggctgaccataccatattttctttatccagtctaccattgataggcatttacagcctgtccatgtctttgctattgtgaatagtgctgcaatgaacatgcatgtgggtatgtctttatgatataataatttatatttctttggctatatacccagttgtggggctcctgggtcaaatgaggattctgtttttagttctgtgaggaatcgccacactgctttttacagtttttgaactaatttacactcccaccagaagagtataagcattcccttttctctgcaaccttgccagcatctgttattttttgactttttaaaaatagccattctgactggtgtgtggtggtgtctcattgtgatttttcttttaatttctctaatgattagcgatgaccactttttttcatatgctagttagcttcatatatgtcttcttttgaaaagcatctgttcatatattttgcctaatttttaatgaggttgttcggttttttcttgtaagcttgtaggttgtctgtttactctgttgatagtttcctttctgttaggaagctcttaagttcaaatgggtcccattggtcaatttttgcttttgttgcagtagcttttggtagcttcctcatgaagtctttcccagtttttatgtctagaatggtatttcctaggttatcatggctgggtttcttataattttaagtttttcatttaattttttaatttatcttcagttgatttttgtaaatcaaaatgaaatgaaagggtccagtttctgtcttctacatagtgttaggtatttattccagcaccatttatgaaacaattcttcccacattcctcttgacagctttgtcagaaatctgatggcggtaggagggtggcattatttctggcctctctgttctgttgcattggtcttttttttttagacggagtctcgctctttggccgagactggagtgcagtggcccgatctcggctcactgcaagctccgcctcccgggttcatgccattctcctgcctcagcctcccgaatagctgggactacaggtgcctgccaccgcgcccggctaatttttttgtatttttagtagagatggggtttcaccgggctagccaggatggtctcgatctcctgacctcgtgatctgcccgcctcggcctcccaaagtgctgggattacaggcttgagccaccgcgcccggccagttgcattggtcttatgcattaataagtttcatataatatctttctctcttttggtttttccctcataaaccttctttcaagtgcatacattgtacaaatttcagatgtccaagagttcaaaactctttgaaaacttccaaaaatgtttttgctattccctctttttgtaaggaatttagattatatgtagatatttttctttgttttattgaaatatatgtaaatcatattaacagctaaataaaccttttgtcattttttctgactccagattatctttatctagtacttcagatttattactttgtttttgcttccaaaatgtttatttttttcatttttagtcctttagacagatttgtttagataaaagctcattttaatagcatacagaagcttagcacaaagagaattaaatttagcaatacagaatgataaagactaaaagatactaaatttctttgtcagaaacctgatgatccaaggtaattatccaatatttgcaggctgaagcacttgtactgcaaaagcaagaacagttcagtgcataaactgaacagtgcagtctgtagttgtaccttgctttctattacttcataacaattagtatagttatgtgtaatgtttgcagactacctgcattcatataaattaaacagtattttcttttcttttttttttttttttttttttgagacagagtctcactcttgcccaggctggagttcagtggcgtaatttcagctcactgcaaccgctgcctcccgggttgaagtgattctcctgcctcagcctccagaatagctgggattacaggtgtgcccaaccatgcctgtctaaattattgtatttatagtagggatggtgtgttatcatgttcaccagcttaatcttgaatccttgacctcaggtgatccacccgcctcagcctcctaaagtgctgggattacaggggtgagccataaacagtattttctacaatagtatgagtacaaagctgcactacttactttgaattaatcacttaaatggttattttaatatcattatttacacttctgaaatataaaatgttttaactgaagtatagttttaatttttaaaactataattttaaactatacacatactatatacatactatatacattatgactagttcattaaaatgatttatacttacttaagtctaatatccaaataaaatttataccaaattgttacattaagtagatattagtgtgacatgtttattactttattcaatagggattattatgagtaaacacaattttaatatcttttatttcactaaattggtatgctgctattacaggacaaataaagacaggtgatgtggccacccaaaaactataatggttcttcagtttgctatgttgcaagctctaatatgttccactatatgaacacagtcagattctatttcttcatcaaaaagtgttgcttgaagttgtcagatgtatttcaatatagaacctccattcaatggctaggagatgagggaacagcagagatggaaaagaaactttataaaattattcttaagatctgcctccttcataatgctcatttctcatgctgagagtagcttgcactttgggtgtttagagagagatttcttttaggggaatattttctgactgacatgatcaatcttatatctaatctgagctttttcttagattattttaacttttttctcaaaataatcttgctcagatggagataatgtttttctctccaatgctttgggtgtctgtttcagaagatctatttgtatcacatggtttctgaataagctgggctgtcacagtgagagcttttggagctatctctatctggactcatgctggaaattcagcagtattttttccttgtcaccattataagtagaaaggagttgaaacactgctcccatttccattactgtgaaggtgaaattttacccaggaggcctgcaggctctcctcctgcagctcaggcttcactctctgatgtgacactggagtgctgctgtggcaaattgggttcacacaaaaggtgagctgtgctctgggctgtgcctcagtggcagatggtagaggtaaatagaggacactagctttcgtgcgtgtctatgtgaagagaccaccaaacaggctttgtgtgagcaataaagcttttgatcacctgggtgcagttgggctgagtccgaaaagagagtcagcaaagggagataagtgtggggccattttataggatttcggtaggtaaaggaaaattaaagtcaaagggggtttgttctctggtggacaggaatgggggtcgcaaggtgctcagtgggggtgctttttgagccaggatgagccaggaaaaggactttcacaaagtgatgtcaacagttaaggcaaggaccggccatttacacttcctttgtggtggaatgtcatcagttaaggtggggcagggcatattcacttcttttgtgattcttcagttacttcagaccatctgggcatatacgtgcaggtcacaggggatgcgatggcttggcttgggctcagaggcctgacattcctgccttcttatattaataagaaaaataaaacaaaatagtgttgaagtgttggggcggcaaaaatttttggggggtggtatggagagagaatgggcgatgtttctcagggctgcttcaagcgggattgggggggcgtgggaacctagagtgggagagattaagctgaagggaggtcttgtggtaaggggtgatattgtggggatgttagaagaaacatttgtcgtatagaaagattggtgatggcctggatacggttttggatcaattgagaaactaaacagaagatacaaggttcaaataaaggaaggagaaaaatgggtattaaaggactaagaattgggaggacccaagacatccaattagagagtgcccaagggggttcagcgtaattacttgcttggttggcaagtttttgggctctatccttgagtttttttatgttgtcatacaccaggccagattgatttaggtaaaaacaacactcttcatttaagaatatgcagggtcctcctttttcagcagtgagtaagtcaaggcctcggcagttttggaggacaactgcagctaaagagtcaacttgggcctggaggactgataaagtttgtgatatgtctgtgatgctagcagagaagtcattacacaggctacagaaggtcgtgacagaggttgaaatgcctgctattccagtaccaagagcaatagtggaggcagaaagtcctaaacggaccatcaagggaattagtggaagaactcttttttgtcatgttggtgtcatgaggggaacagggagctcttcggtcctatttgcaaattgaattttgggggtaaggaagactagtgtacatgtgcctgtccaattagcaggtagacacatgtaggtagaggatccacagaggaagaagagaccttgtgtgaggcaaaactggagatgtaaagtaaaaagatgagaaggagtgctgaaaggggtgtcttgtacccagactcctagggatccagctagggcggcagctgtcagaggttgtaatggggactgatggggtaactgcatagagggggagttttgattttcatggtgtatgagaaaacattgagtatctatgagcaacctttcactgttattttcggggctgggtataagtaaacgagaagagggcctgggaggagagtctgacgagcaaggggaaggtagccaaggatggagtgaaatacagggcaagtgtcttcctaagcaataattgctgcgaatttttttaagtttgcctgtattgatagagggcttgtctgtaatatgcagctggaaggctccagttgtttcagtgatgtgtgtagttgggcttcggagatgaagagtaaaggaacatcgagaaggtaaaagattacctaggggaattccagtgggtctttgcggagagatacataaaggagtggccactggaatagtaatttgtgttgtgagaggtccaaataggggggaagtagagttaatataaggagaaaggttttttaaataagtgcgaaggagggcggcagcttgctgatgtgaaatgtctggggaagtcttgctggacctgtccagaaagtaaatgagttcttcaggagggtaaagttgagggctgttaaaggaagttcggaggtgtagggagacggggggtgttgcccagtctgtctgtaaggtggggacagctgtgtaggcactggaagaaagggaaatgcaaaggcagcagttgttcgccaaggagggattagaagcggctaggagagaatgggtaaggttgatactgtggtggagatagctggggagaggtagagggtgacataagaatgggaatgagaataagagtgagcataaaagtaaagagtagaacttcatcagggttggaagtattggagggtgccctgccagcaaagatcatctatccactctaagagggagttaagagtggtggtttggggatagcaccaagagatatcagctgtaatggcttgaagaaacagtgtaaactggcagtgtaaacaagagtagggcatttataagtagttgagaatggagaataggagtatgaccggacagaagatagtagggatgactagtttttggggctcggcctaagtggtgggggtgacttcgtaaagccctgttgcaaaaagtagggtaaggacgaacagacctaatagaatgaagggatgtattaggctcataagggttattactgttcttcagaaatacgagtgagtttaagggaagtgggggagagtacttaagtgggggagagtacttgtgacttctaggaggaagaggagggattaggctggctgtccgatggacacagctttattctggaatggtgaacccagtggggaggatcctgcaggcggacggcagtcggggactatagatgactaagtagggtcccgtccatcgaggttgtagagtttgaggggtcagattcttaacaacaactgatcgtccagctaggttgtcttcatatggctggcgatctggagtaggtaagagaagattagaagcctggtgaatttcctgtctagcctgctggaggactggaagatagtcacctagagggctggtgtctgggatgaggctggggccaagcaagaaagtgcgtccatataaaagttcaaatggactgtaccctgtagcatctcgaggacaggctctgattctgagaagagcaagaggtaaaagtactgtccaatcttttttaagttggaggctgagcttggtgaggtgtggctttaaaagaccattagtccgttctacctttcctgaagattgaggatggtaagggatatgaagtttccactgaataccaagagcctgagaaactgcttgggtgatttggctagtaaaggctggtccgttatcagactgtatagaggtgggaaggccaaaccgaggaattatgtctgacagaagggaagaaatgaccgcggtggcctttcagaccctgtggggaaggcctctacccatccagtgaaagtgtctacccagactaagatattttagttttctgactcgaggcatgtgagtaaagtcaatttgccagtcctgggcaggggcaaatccccgagcttgatgtgtagggaagggagggggcctgaacaatccctgaggggtagtagaatagcagatggaacactgagaagtgatctccttgaggatagatttccatgatggaaaggaaatgagaggttctaagagacggtctagcggcttgtaacctacatggaagaggttatgaaatgatgacagaatagaatgggcctgtgaggctggaagaagatattttccttggtctaagaaccatttgccttgtgtgggaagagattgataggtggaagtttccgtgggggagtaggtgggagtgactgaagcgaaggagaaaaactggctgtgagggacagaagttggagagctagctgcttgtctagccactttatcagcataagcattgcctagagcaatgggatctgatgccttttgatgccccttgcagtgaatgaccccagcttcttttggaagtaaagtggtcttgagcagagtttttattaaagaggcattaatgatggaggacccttgtgtagtgaggaaacctctttcagcccatatgactgcatggtgctgcagaatatgaaaggcatatttagaatcagtatagatattgatgcgtagtccttttgcaagagtgagggcttgagttaaggtaactagttcggcttgctgagaggtagtggagggaggcagagcggtagcctcaatgatagatgtggaagatactatagcatagcctgcctttgctggtgagtggtgattaggcctggtggaactgccatcaataaaccaagtgtgatcagggtgagaaacagggaagaaggaaatttggggaaatgtgaatgtcaggtggatcagagagatgcagtcatgagggtcaggtgtggtatccggaataatgtgggaggccgcatttaagtccaggccaggaacaatggtaattgtgggagactcaacaaagagtgagtatagcagaaggagccggggagcagaaagtatatgtgtcaggtgtgaggaagaaaatagattttggaaattatgagagctgtagagagtgagttgagcatagtttgtgattttgagggcctctacaagtattagggcagcagcagcggctgcacggagacatgatggccagcctaaaacagtaaggtcaagttgtttggacaaaaaggctacaggatgcgatcctggtccttgtgtaagaattcagactgcacagccctgcacttcggctgtgtgtaatgaaaagggttgggatgagtcagggagagctagaataggggcagtctctaaagctgtcttcaaggaatggaaagaggagtggggaaaggatttaggatctatggggtcagctaggtttccttttgtgagtttatataattgttttgttaggttggcaaaaccaggtatccaaaggtgaaagtatccaaccatgccgaggaaggaaaggagttgttgttttgtagaagggattggggtttgagagattagtcggatacgatcggcagggagagcatgtgtgttcttatgaagaattatgccgaggtaggtaacggatggagaagaaatttgagctttggagggggatacccgatatcctttggagaataaacactgaaggagcagaagtgtgtcttgttgagaagattcaaaggaggggctacaaagaagaaggtcatcaatatattgaataaggtgagaagcggaggggtggaaggaaagtagatcatgagaaagagcttggctgaagtaatgagggctgtccctgaaaccctgcggcagcacagcccaggtaagctgctgggactgatgggtgtcagggtcagtccaggtgaaagcaaagagaggctgggacgaggggtgcaggggaatagtgaaaaaagcatctttaagatcaagcatggaatagtgagttgtggaggaaggtattgaggacaaaagagtgtacgggttgggcaccacagggtggataggcaaaacaatttggttgataagacgcagatcctgaactaatctgtaagacttatccggtttttggacaggtaaaatgggggaattgtaaggagagtttataggttttagaagcccatgctgtagcaggtgagtgataacaggctttaatcattttaaagcatgctgtgggatggaatattggtgttgagcagggtaagggtgattaggttttaatgggatggtaatgggcatgtgatcggttgccagggaaggagtagagatgtcccatacttgtgggctaaggtggggggatatgagaggaagatgcgaaggaggcttttggttggggagaagggcggcaatgagatgtggctgtagtccaggaacagtcagggaagcagataatttggttaaaatatcttggcctaataagggaactgggcaggtggggataactaaaaaagagtgcataaaagagtgttgtccaagttggcaccagagtgggggagttttcaggggttttgaagcttggccgtcaatactcacaacagttatgggggcaaggaaaacaggcccttgaaaagaaggcaatgtggagtgggtagcccccgtatcgattaaacaggggatggacttaccctccactgtgagagttacccaaagctcggcgtccatgatggtccagggggcttccgaggcgatcgggcaatgtcaatcttcagttgctaagccaagcagatctgggaaggagtcagtcagagagccttgggctagagctttaggggttctaggagtggctgccgggtgagctgggcagtctgatttgcagtgagtccctgcacagatgggacatggcttgggaggaatcccgggctgcgggcattccttggcccagtggccagatttctggcacttgaagcaagatcctgatggaggaagtcttgtaggaatgcttgactgctgtggcttaggcattctgaagttctcctatgcaggaggtgtggctgggttttgtctcacagtaggggcaagtaactgtaactcagaaatgcattgccgtctggctgcttcctccctattattgtgcaccttgaaggtgaggttgattaattcctgttgtggggtttgagggccagattctaatttttgaagtttttttgtaatgtcaggagctgactgggtgataaaatgcatattgagaataaggcggccttctggcccctctgggtctagggcggtaaagcgtctaagggttgctgctaagcgggccacgacctgggctgggttttcatcttcaccttgggtagtttctttaagtttgtcataattaacagctttgtaagctgcttttttaagcccttcaactaggcaggaaaccatgtaatctcgcctagctatacctggggaatttgcctgatggttccattggggatcctctcggggaactgctctaatgccttcctggaggtctggctcgtgaagccggcggttatcagcatgagattgggctagagaagaaactctttcccattcatctggggagagggtagaagtcaggatgacatttaagtcactccaggttaagttgtaggacagagttagacattggaattcctgtgtatatttagtggggtctgatgagaaagagcctaaacattgactgatctgagaaaggtctgatagagaaaaaggtacatgtaccctgactatgccttcagctccagccacctctctaagaggaaattgttgggcaggtggggaagagctagtcgcggaactaaactgtaagccggaccgggtgtgaggaggggaggtgatagaaggattatagggtggaggagtggaggctgaggaagaattgggacttagctcggcctggcaatgagcagcctggggaggaggggaaaggtcagatgggtctgtagaaaaggaagactggaaagactcagcgatgcttggggttgggactgaggggacaggcgggagggaaagaaggaggatctgggaggaatcgcattgggaacagaggctagggagggaacgaagtgtgaaaaatgcctggacgtaaggcacctcagaccatttgcccatttttcgacaaaaattatttaggtcttgtaggatgaagaaatcgaaagtgccgttttctggccatttagagccactgtcgatttgtattggggccaagcagtgttgcagaagaaaataaggcatttaggttttaggtcaggtgtgagttgaagaggttttaagttcttgaggacacaggctaaaggagaaggaggaatggagggtggaaggttgcccatagtaaaggaggcaaaccaagagaaaagagagcatagagacacggagggaaggggttcggaggttcttaccctccagaaaagcaggaaggggggtcagggcatggaaataagggattggggcacagagataagaggttgggctgcagaaataagggattggggcacagataagaggttggggtgcagaaataagggattggggcacagagataagagataagagattggggcacagaaataagggattgggggttcttgccccctagaaaagtgggacttgccgctaagggtgaaggagaaggggttgaggggttcttgcccctgccccagaaaagcagagaaggggtagagacaaggagagaaggggttgaggggtacttgtcccttccccagaaaagcgggacttgccgctaagggtgaaggaccaaggcaggtgtccctgtgtggtctgacacccttgaaacgtgagtgtataatcagagaggcatccctgcaatgattaaacaccaagggaaggctgccttcccagtccgtgaccggtgccggagttttgggtccatggataaaacgtgtctcctttgtctctaccagaaaatgaaaggaattgaaattaagagaagggagagattgaagtgtggcgccaagattggaaggagaaagaggttgagggatagtgagggaggttggagaagagagtaaaaagaggccgcttaccggatttgaaattggtgagatgtttcttgggctggtcggtctgaggacctgaggtcataggtgaatctttctcatggagcaaagaacagaggacaggggattgatctcccaagggaggtcccctgatccgaatcatggcaccaaatttcatgcatgtccgtgtgaagagaccaccaaacaggctttgtgtgagcaataaagcttttaatcacctgagtgcaggtgggctgattccgaaaagagagtcagcgaagggagataagggtggggccattttataggatttgggtaggtaaaggaaaattacagtcaaagggggtttgttctctggtgggcaggagtgggggtcgcaaggtgctcagtgggggtgctttttgagccaggatgagccaggaaaaggactttcacaaggtaatgtcatcagttaaggcaaggactggccatttacacttctgtggtggaatgtcatcagttaaggtggggcagggcatattcacttcttttgtgattcttcagttacttcagaccatctgggcatatacgtgcaggtcacaggggatgcgatggcttggcttgggctcagaggcctgacactagcaaccaggagaaagcaagcaggagtgctgtagccccctgccagagtgtacagagccactgctctaagtagccaaaatgatagaaccctatttaaccttttttgtagcagagtgaaaccctaccttcagcaggcacttggcttcaagcagctaaaccacctcctgttatgaagatgggaaatgtttatttgtcattgaatatgagcaattagcatacacacatggcctcgtcaatctccaggtgaatttaggatgaactatatatgacgtggtgctggaaattcttctacttgtggactaattatggtgaccatctttctatctttgcagtcacttaagcagattgactatgatgcatgtcacacttaattgtgtaataaaacagttttctttctgtactattattgtggcatttctctggggctggagacatgttttctttattgtttccaaatactgtctagaattaccagacatgatataaacacataaggtgccaatgagaatttactctagaggggacttttcctctcaggcttccagttgactgacacttgtgcagcacagtgcacgctgtcccctaaagatgcaggcagaattgtgtctcagcctatttattaatctatagtcatctacagtcacttctagagaggctagatcagatttctataaatttcacagggcagcaatcagttattttacctctttgactcttgtattttcagacctgaaacggattcagagaccatggggcccacaaacccaattagagtaacgtgtgcattgagtagacatgtagataagagattctccactttcttctttctactctgctaaaatgctcacaaatgtgctataaacatgctgccactccatccattcttgccctaaatctgcagctccatattttgaatccaggtcttgagatttgggaaataaaaaactttatctgaaaagtgcaagtactttttctccctttgaactatgtattcaaatgtatgtatctgttgaaactgttcacaattgccacaagtagttataaattaaactaatgccacattggacactatatcccataccctaaaccataacaatatatatctaatcaataatcaatgttatttctgtaaacaaatataaatttctgataaacaactttgtgtcagcccactctgtgtttctcttattgtctttacaaatcttcttgtaactgctgctaatcaaagtgtagatttcaggcaacttgaatatttgctcccaggttataatccataaacttgacccaaataagctgtctacttatattcacgttgtgtcagctttttgtttttttcatgtagacttatcatttagaatgtgctagaacagcctctattaggggatctcttcaccaaaggatgcaaagccaggtggatcctacctagaatctgtagataaggtctgtcctctgccaggaatttacaaaaaagggtgggagtttggataaagaatgtacagaaaactaacaaaaggcattttctgtattgtgagatgtcagcaaagacagcttacagcccccatttgggagtgtggcattttgagattttcacatcttgttcattgacctgctacagtgatgtgagaggctccaggaggaactagcatctgatggcagaatctgtaaatgtaaataagcatcttaggagtgagagatcaaggccacaaaatatccagagccatgaccacaactatatttacctgtaaaatgtgatactggagtagagtatttttgttctttctcttatccaagagctagcaaatcaggacaggagatccaggttctggagctccaccaaggcagttccattttctattcagaatcagcctcagttcctccagcctggcttatcattgggccatgagcccagggtcactgagaattctgtcacaatcatctagatgtctttgaggcattggaggatgtcagagcagaattgtgtcaggctgacaagaatggttttttcttctgtctcagtgtaagagaaacgagtcatcctgtgtttgttcctcctgtcatacaagaggtgtctttggtacccagatgagagtttctccagtttcctggtacttggatgataaacacggagatctggagacccaaatagataagctagttgcttccatttcatatggccattaaaaaaaatacatgaagcagtcatggttccaacaatccagaaacttttagtctagactagcaactggataaataattgaattatgcaacatatggttggtacaacaaatacacgtgtccaaaatactgggctttatttaggccactttctttatgttgttgtgacttctgatgtctacacccgaagggctatttatgaacagaagaaatattattatgctttttttttttgagatggtgtctcactgtgtcacccagactggaattcagtggcatgatttcagctcactgaaacctctgccaccagggttcaagcgattctcttccttcagcatcctgagtagctgggattacagatgcctgccactgcacacgtttgagcagaccaattatgaggcaattctcctaactctgcttccagaagagtctccctatcaattactgaatacccattgtggttttttccctcaatcacatgggaggaacggtctatcatcctgtcctgaagggagttcctcctaggtcagctcagacttttgtatggtaatgaagatttaaatcccctgttaggaaacctgctggacactggtgtggccttcttagccttactcttttgtcttggacaactgtcctccagatctgtcactatctgaggcgtcccacgacaggcagtcactagatacttctcccagccactaagttgtgactggagaactttgctgtcttcacatgcttttctaattatgcctgaaagcccaaatcctttgttagggagagacatcctagcaaaagcaggggccattgtacactagaattaggagaaggaaaaagggtaaatatatatacagactctaagtatgcttacttagtcctccatgcccatgcagcaatatagagagaaggggaattcctaacttccaagggaacacctatcaaacatcaggaagccattaggagagtattattggctgtacagaaacctaaagaggtggcagtcttatactgctggggtcatcagaaaggaaatgaaaaggaaatagaagtgaaccgccaagcggatactgaagccaaaagagctgcaaggtgggaccctctattagaaatgattatagaaagacccctagtatggggtaatcccctccaggaaaccaagccccagtactcagcagaagagatagaatggggaacctcaggaggacatagtttcctcccctcaggatggctagccaccaaagaaggaaaaatacttttgcctgcagctaaccaatggaaattacttaaaacccttcaccaaaccttttacttaggcattgatagcacccatcagatagccaaatcattatttactggaccaagccttttcaaaactatcaagcagatagtcagggcctgtaaagtgtgccaaaaaaataatcccctgcactgcaggccatacatttcaatccctgtatcattaacctccttgttaagtttgtctcttccagaagcaaagctgtaaaactaaaaatgttcttcaactggagcctcaggtgcagtccatgactaagatctaccatggacccctggactggcctgctagcccatgctccaatgttgatgacattgaaggcacccctccccaggaaatctcaactgcatgacccctactacaccgcaattcagcaggaagaagttaagagcagtcattggccaacctccccaacagcatttgggttttcctcttgagagggggatgactgagagacaggactaactggatttcctatgcctgctaagaattcctaagcctagctggggaaggtgactgcacctgcctttaaacatgggacttgtaactcagctcacatctgacaaatcaggtagtaaagagagctcacgaaaataccaattagactaaaaacaagaggtaaagaaataatcaaatcatgtatcacctgagagcagagggggagggacagtgattgggatataaaccccaggcatttgagtcgggagtgcacaaccccctttggatcccctcccattgtatgggagttctgttttcactctattaaatcttgcaactgcacactcttctggtctgtttgttacggctccagctgagctttcacttgccgtcgaccactgctgtttgccgccatcccagacccactgaagacttccacccctccccctccggatccagcagggtgtccgctgtgctcctttgccactcccgattaggctaaaggctcgccattgttcctgcatggctaagtgctcgggttcatcctaactgcactgaacactagtcgctgggttccacggttctcttccatgacccacggcttctaatagaattataagactcaccgcatggcccaaggttccattccttggaatccatgaggccaagaaccccaggtcagagaacaaagggcttgcagccattttgtgagcagctgccaccatcttgggagtggcctgccaccatcttgggagctctaagaacaaagacccaccccttaactaaattgctggtgtctgtgctagaaaagggcacttgaggatgggaaaggagaaacttttatttttatcttcatggagcagcttattgtttttgaatctctaattgtttttgaatctcttctattttaaaggacataaatgggtggactttttctgtctttgtttttctgccatttgttgtcatgctaggaggtagacatgtggcactgacacctttaaaggcatattctccagatgcaggtgtaatttctccagagaatgtcatttgataaggaattccagagaaggaggagaaagaaaaaaaaatggcttttcttcaggtaaacatgtctcagatgcagagctgtgtccactttgcctcctggactgccatgcatttagcactcagaaaactttacatctgtacatgtgtttatcctccctaatgagtttggttgaactacttaaaattcttatggtagtcaagggtctctgaaaaatatttctttcctatattccagagccttctctacattctccatgtcatagcttcttatatgccatgcagaattcttagcaagaatttatgatcctcaatgtgggatacagtaaatttgtcctcaaaggtttcagcttgttaacttcctttaaaattgaagaggggaaattaagtacaatgagttctgaggttctcttcaaagaaccaaaatgtcagtatgttcatctttcctgttctttgttctctattttaaagttcaacttcctcgatcttaatgtctccttgctcctagtttcagtaaacaatcccttctaactcatgtatttagggtcgttagtcatccctagtcacctgctctgtcctgagtcactcctactcacctgacttatacccatccttcctgctgactattcatcccaccactctggctcttaccattgctctctttaaaatagccaatcagaattagcttagactgtggtccaaccctagccaatagcagaaagacacagcaatagggactagtggtgttagcgataaggcccccttcccctcccttgcccaagtgtactcttgccattgctccatctgtgagacacacccttctatagaagtatatttgccttgctgagatgttctctttttgagtgctcattttccctgagactctgagcaattgtttccaacatgcaatcttaaaaatgtttcctttgtagctgttgaacatgaaaagatatggatactcaagatttctactggggaaaactgtggtccttagttaagatggagaatatgtcatgttgaggctccatctgtgttccattagctctatgcagaacaggattaagaaaatgcttatttaaatggaatggcatttattacccagaaagttctgaaaaaagtattaggagatagctgctctctagggtgctaaatgacgcctacttaaaattcctactaaaaattacagaacataggagttatctgtactttgaagtttgtataaaacatgttcctttatggttaaattcatattttacttactttttttgggaggaatatgttggggtggccagaccaaacaccaggtcgtgggggtgacaaagtctgatggactcaatcctttgagtcctttgagaaaaagacagtttgagagagaaaggtgggacaccagggggccattgcgatcctcgaggctgtgaaggcccagagctctgggagcccacgctgtttattggtaatccaacagagaaacaggtggtgagaatgtggaggtcgaaaggacaggcacatgatctacagctgtgaaggtttagcatttataaggaacctgttctgctacttgagataatgggaataggagcctaggagggctagaagcaaggaaccagcaagtctagacacattccagaggacattatgtcagtcatgcaagccctgcctcagctttcttcccaaccctcaacttttttctcaacaggaatatttcaacagtgatgctgtattcttctgtgcgcattagcacatcataaaatttgtcctagtgcacttaatggtgaatgattcacttggtgaaatagctctgtaacagatttctttcactatagagttaattattttaagtatctttgtgcagctgatatgtataaaccagcacatttaatctggcagctgtccttttttcttattttttctacatatttttgtttggaaaatgaaggctctttgtttacaggccagaaaaactgggaaaaacaaaggttcttccacttggtggatgtttgacaaaatatccttcttgggccaaaaacattgacattattcgtgagcttgttagaaattcaaaaaatcagactttatttcagatcttctggaaaaaaaaaaagaacctgcataacaaggtcttcagcttattgtacatattaaaatttgagaggtgccttctaagtcaccgtgtcttttctgtctgaaaaatattcacaactcattccgtatgatctaaatatagcactcaaaaatgtacatgttcatgttcatgcccttaattttataatttattatctagaaaaatatcatatatgaactgatgttgtggatcctattctgctcttttttctcaggcaatatattagaaaatatttttgtgttggaaattgttttattggataatttagtgagtcttgtaagtcagaaccaattctctttactctccaatttcaccttaactcaaattacaaactttgcccatgaccacttggtaaaaatgtgtgtgtgtatatgtgtgtttttcagggaccattggaatttagagatgtggccatagaattctctctggaggagtggcattgcctggacactgcacagcagaatttatatagggatgtgatgttagagaactacagacacctggtcttccttggtgaggataagtggaatacataattcataatataccctaaaggttgtttttatgtttttttgtggaatgatttttagtaatgtattgtttgcataagagagttttagatcccccttttcctgaaaatcttcagaatttcttttagaagtgaatttcttcaagatgtttcatcttaatttaaactttccactttcctgagatgagctgtattcttcactctaaattagtggtaattccagaaatttagtggcataaaatattgttacctccacctgaaaatctaattgccaccaccaacttttgattcagtagcaccaggtaataaaatttaaaaacctacaaattaggacaaggcgcagtggctcacacctgtaatcccagcactttgggaggctgaggtgggcaggtcgcctgaggtcagcagtttgagactagcctaaccaacataaagaaactctgtctctactaaaaacatgaaattagcttggcatggtggcacatgcctgtaatcccagctactctgaaggctgaggcaggagaatttgttgaacctgaaaggcagatatttcactgagctgagattgcaccattgcacaccagcctgggtaacaagagaaactccgtctgaaaaaacaaaaaacaaacaaaaaacaaaacaaaacaaaacaaaaaaccacacacacacaaaagaaacctatgatttgaaagtattttctaaatcttttgaaattttttttataactctattttggaatttactagactattttatcacatcttctctgctgagcacagtactagcttgtaattggagaatatgaggaagattcatgttatttatttttaataaaacaggtattgttgtcactaagccagacctgatcacctgtctggagcaaggaaaaaaacccttcactgtgaagagacatgagatgattgccaaatccccaggtaggtgcgagtgaaaatgaatacaacagacaacacagataagaggtcccaaggtcaaagagaaagccggtccttaaaatgtgatttaggaagctgtgttccaaagagaatagttcctgggattctgttttttgttttgtttttaatttggctctcacaaagggacatcttctgtcttatgcttttaaattttctaaggattctacttttctttcggtgagcttccttcaacttcacagtgagagccagagtcctcttcatggcatataagagactgcacaatctggctgcttttacatcgtcttggggacacagaaatatctgcatgactttgagaaactaaactgtttttagtctttttgcatcaggcctgaaatgtgtgagggcagtagtatcagtttcatttctttgttcatttttctgcatggtccattctgtttttattactatatagtcttaaaatatcatttgaaagtataagtatgatatacttctgctctgttctttttgtcaagattgctttggctattcaaagtttattttagtttcatgtaaattttagaattgtattttccatttctgtgaaaaagataccactgcaattttgctaggaagtttattgaatctatagatcactttggataatatggcacttgaataatatttattctttcaatctatagacataaaatattttaaaatttatttggaacttctctaattttttctttttttttttttttttttttttggtaaagagtttttacctccatggttaattttttttctcagaaatttattcaatgctatagtaaataagattttttctttttattttatgagagtttaagtatataaagctgtacatatacttgtatgttaattttatgttttgctaatttactgagtatttattatttgagacagtttttactctgtttatgatttttaaaatataagattgtatgatctagaaacagcaactttttacttatttttcttcaatttcaatggattttttatttatttcactaattcttctgccacatatttccagtgctacattaaaatagaagcattgacaatgagcacaatatagttttgcattgctgtctgaatttgatgaagcaaatacctcttcaggttttctttttttgagacggagtcttgctctgtcacccaggctggagtgcagtggcgcgatttcgctcattgcaagctccgcctcccaggttcacgccattctcctgcctcagcttcccgagtagctgggactacaggcacccgccaccacgcccagctaattttttgtatttttagtagacacggggtttcaccgtgttagcctggatggtctcgatcttctgacctcgtgatccacccgccttggcctcccaaagtgctaggattacaggcgtgagccactgcgcccggcccaggttttcataaattggttttagaaggtaaagatcttttgttgggcccttagtgtgatgagatgccctctgaattgatagtgaagaggggttgtagcttggtcacaaggctgctgggtctgcactagggtccacctttagttggcttgttacaggggcttgggttgttgtaattctcattttatttttggacaggctgaatatccttcaggactttgctctgtagggcagacactagggcatgtttttgcagtcgggtctgcatatggtgggccttgtatcaggatgtggatgagtatggctctgactgagtaccagacagcatttcctcaggtaactgtgtgggtttctatgtgggcagaattggccatgatctgtggctcaggtaactgacactgagtcattgaaccgcttcagggaccccagtaaaggccaatgtcttcatgcctgcctgtatagctataattgggtgcctttctccaggtctctggagtggcagaacctcagccagactgtggctgggaggagtttgggatggttacagagtaagttctgaattctcagcgggaccaagttgggtaaataaacccgatcctggtctgtagccaagaacagcggccctttagtttcccacctaaatgagggcctgccttctgactagaaggcttctcaatctttagctttaacagcatttcacaactccctccctggatctcaaatctctcttagaggcccttattttggaatggcatcttgctgcataatgcatgcaggtctcaaaatcctggcctgaagcagttctgtaaccttaatgttccatgtagctgtcattacaggtgtgaaccataatacctttttctctcataaaggcatttttgtcagggatggctgacttttttttgctgtaaggggatatgaaaataggacaatttaactctttccttcttactgatgtcactctccatatacatttttactttctattttctatttcaaatttgtctgcaattttagtttcagatatttaggacaatatgccagaatttgatggtatacttgaagtgaattacataattattgggcacccaatatttaactaaatatgataaataactaaaatagttacttataaatcgaagctttgctgcaggcaaaaaggaattataggattttcatctacttttttcagcctatatctaaataatatagattatttcctaatatttgttttacatatcagagggtctaaccctattctggaaaaaaaatatatattttttctatatttaacaatgtaagtctactcttttcttctaaagttggattacagcagttgcgttttgtgtaagaataccatatatttaaaacatttgttttttaacaaatctagttttaaatgctaatttattaaaagtttctcattagaatcttctatttataattatgctgcatattctctgaaattttactgccacagagtgcatgccaatgattcaaaatacctgtatatgatgaatacatagtgatggttaaatattgcagttacttagacaaattgttaaaaaaaattttttggagaagtagttactctctctcacccaggttggagtgcagtggtgcaatcctggctcactgcaaccttcacctcctgggttcaagcaattcttgtgcctcagcctcccaaatagctgttattacaggcacttgccaccactcccggctaatttttgtatttttagtagagatgaggatggggtttcaccacgttggccaggctggtcttaaaactccttacctcatgtgatccactggccttggcctcccaaagttgctgagattacaggcatgagccaccgtgcctggcctgactactttttttaaatgatacattaatgtagcataccagattttatgagtaaacattcttttattattgtttgtagttctatattagtgtgtttcttcagtgtaggtttctcttttttttttttttttttgagatggagtctcattctgtcatccaggttaaagtgcagtggcacaatctcagcacaatctctgccttctgagttcatgccattcttctgcatcagcttcccgagtagctgggactacaggcgtgccaccacaactggctaatttttgtattgttattagcaacggtgtttcaccatattggccaggctggtctcgagctcctgacctcgtgatctgcccacctcagcctcccaaagtgctgggattacagtcttgagccaccgtgcccggcttcagtgtaggtttcttaacatcagtttattgtgtctattggttttacttatgtagtaagtagagaatttgcaattctttttgtatgctttaagtcaatttgaggtttagctaagagataaattatgcatctctatcacagtcagattacatatgtatgtgtgtttatctataaatatttagacaatttgcaattctgtttgtacactttaagtccatttgaggtttaagagataaattgtgcatgtctatcacaatcagattacataagtatgtgtgtttgtctgtaaatatgaccccaattttagatattttttcttagctgaatttcaatgggagttttatcttgtctaagtgagtagtcatggagatagtcttactttcaccatgtgtttaataattaatatatatttttccttttgtgagagaaacacttttgtgatctgaaggtaattttcagaaagatgtataattctggattttttttcaatttttctttaaaagcattgttttaaaaacacataacataaaatttaccatcttaaatttattaaagtgtacatcacagggtcaggcatggttgtggctctcgtctgtaatcccaggacttcgggaggccaagacaggaggattcctgtagcccaaaggtttgagaccagcctgggcaacatatggagacccatttctgtaaaaaaaaaaaaattaataatagccaggcatggtggtgtgcagctgtggtcccagctacatgggagattgaaggggagtcaaaattgtgcctctacactccagcttgggtgacagagtgagactctgtctccaaaaaaaaaagctgtttatttcaggcatgttgttatgcaaaagacttctagaaactttacatcttgcaaaactaaaacttagtacccattaagaaacaactgctcattttaccctctctccagcccttgacagacaaaccttccactttctgattttatgattttgactacttatttcatataagtgaaatcatacagtatccataattttgttactgtattaattcaagtgacacaatattctcaatgttcatcttaaaatgtgacaagattgttctttttaaggtggaataatattccattgtatgtatatgttactttttttgatgtttataaatcgggagacatctggattgctttgggcttttggcttttgtgaatacatatacaataaacatggattttcaaatatgttttccaggtcctgtgttgttttgctttgttttattttttttgagatggagtcttgctctgttgcccaggctggagtgcagtggtgtgatcttggctcactgcaacccctgcctcctgggttcaagcaattctcctgcttcagcctccctagtaactgggattacaggcacccactaccatgcctagctgattttttgtatttttggtagagacggggccaggctggtctcagactcctgacgtcaggtgatctgccccctcagcctcccaagttgctagatttacaggcttgaaccactgcacctggactttgttacatattttggatatagatttctaaatgaggaacatttataactttttaaaataatggctgtatctttgttttccaccaacgtttaacatgggtttcatttttattgcatcatcaagagattcgatgttttctaaaaaatttatagtggccattctaatgggtgtgaggtgattttgtttgtcattgtgggtttttctttttcagttctctataaatagttttttgtgccctttcaaatgctttttctcatttgtgtacttttctaatgaaaacttgtttatctatttctaaattaagttattcacctttattgtttagttttaagggttgtttatatattttgaatattaacttctttcacatgtaatttgcaaatgttttcacccattttctaaaggacgttgttactcttgaattgttttttaatatgcagaaattttgatgtctagtgtagttaaacttttctgttatttcatttattgctcatgcatttaatttcttatctaagaaaatggtgccatgaccaatgtgatgtctttttcctatatttttttgaaaggatttgttagttattttatttctcagtattttatttaaatactgagatctctgtgcctcagcctcccaaagtgctgggattacaggcatgagccactgtgcctggcctcctttatttttgagatagggtctcactctgtcaaccaggctaacttgcaaggctcagtgctacccaaacctcccaaattcaggtgatgatctcatttcagcctttcaagtagctgggttacaagtaggtgccatcaaaccctgctagcttttctgtattttttgtagagacagagttttgccatgttgcccaggctggccttgaactcctgggatcaagtgatcagcctatcttagccttccacagtactaagattacattttattttattaagtagtttaattaattcatacttaaaatgattgcttaaagaaaaattaccagttatataattattgtgttatgtgtttctaatagttatgttctcatttcctattttattttcttaattttcatttaattttgtactggtatgctttattttttatttgcttttgtatactttctataaattttatctttgtaatcatcttgaaatgtggagattacatacatcttaaagttaaaactatattttaatcttataagaacttcaattgaatacaaaaactatgcctctatattttcagcttataattgatattaaaattattttatatgctgtatttattaacagatttatgcagatttttttttttgggatggagtctcactctattgcccaggctggagtacagtggcatgatctcagctcactgcaacatctgcctcccaggttcaagtgattctccttcctcagcctcctgtgtagctgggattacaggcatgcaccaccatgcccgcctaatttttgtatttttagtagagagagcgtttcacaatgttggccaggctggtcgcaagcttctgaccttgtgattcacccgcctcatcctcccaaagtgctgggattacaggcatgagccgatgtgcccagtcgatttattcagattcacatattgttttttatattctataaaaaagaactttaaaggtttcatgtataataattttgattttttttttttttttgagactgagtcttactcttgcccaggatgaagagcagtgaagggcagtgggcactattgcacctggcctttttattattattatttttttgagatggagtctttctctggcacccaggctggagtggcatggcatgattttggcaaactgcagcctctgcctcctgggttcaagcaattctcttgcctcagcgtcctgactagctgggactacaggtgtgtgccaccacacctgggtaatttttgcatttttagtagagacggggtttcaccatgttgtttaggctggtctcagactcttgatctcaggcaatccacccacctcggcctcccaaagtgttgggattacaggcatgagccagcatgcacaacctcttgtagtacatcttgtaggactgcgcaaatgctgatgaaccctcttaacttttattttggaaagtctttatcttctttttgaagtaaaataatttaaaatcgagtattgctggttagaaatgtttttttgttacatcaaaatttgggaagttctcaacttttttgttttttttaatcttcaagtacttctgtatttctttttccctatattctaagatttcttttatgaatacattgatctacttgacggtatccaataagttttgtgttccatgttttactgctttttttgcaatttaatatttttgtgttatatatttttgggtatgtcacatcacagcaattaattgtggtttgatttttttgtttataattgtatatgacaatatttaactctgtaccacttaagacagtgtggagcaaaattaaatatgaataagccatatgtctattaccaatataattatttctgtttcttttcctgtataaatattatccctgtagttttgtgtcacttgtgtgtttgttgtgtaggtttgttgtaacggttttttatttttttttcttttttttttctcctttgagagggagtttcactcatgttacccaggctggagtacaatggcaggatctcagctcactatacaacctctgcctcctgggttcaagcccttctcctgcctcagccttccaagtagctgggattacattcgtgcactacaacgcccgcctaatttcattcatactttagtagagacagggtttcactatgttggtcaggctggtcttgaactcctgacctcaggtgatctgcccaccttggcctcccaaagtgctgggatacaggcgtaagccaccgcacgcagcttgtaacagtgtttttaatcctgtctaggtgagtagtcataaaaactctcctaatcttgccgtgtgcggtggctcacgattgtaatcccagcactttgggaggccaagacgggcggatcatgaggtcaggaaattgagaccatcctggctaacacggtgaaacccgtctgtactaaaaatacaaaaaattcgccgggcgtgttggcgggcgcttatagtcccagctactagggaggctgaggcaggagaatggagtgaacccgggaggcagagcttgcagtgagcggagatcgcgccactgcactccagcctgagggacagagtgagacctggtctcaaaaacactcctaatttcaacatcaatttccttgtgaatctatcttatttttgtgtgtcagaaacacttttggatttgaagataatttcaaaacaatactaactctgtatttttttaaggtattattgtttacttatgtgttatgtgtcaaaaaataataaaatttataataaaatatttctaggccgggcggggtggcttacgcctgtaatcgcatcactttcagaggctgaggcgggcagatcacaaggtcagaagatcgtgaccatcctggccaccatggggaaacatggtctctactataatacaaaaaattagccaagtgtgttggcatgcacctgtaatgccagctactgaggaggctgagacaggggaattggttaaacccgggaagtggaggttgcagtgaaccgatattgtgccactgcagtttagcctgggagacagaatgagaagtatatatttctaaatattcagtttgttcatattaattatattgacattgttatgcaacatatcactagaatgtttttatcttgcaaagctaaatctctatacacattaaacaactaccaattcttcccatttcgtggcactcttcaaacaccacattgttttctgtttcaaagagcataactgatttatatatcttatacaatatctgtctgtttgtggctggctcattttgcataatgtcatcaatatttatcttaataattgttagaatatgtgttgtatcatttctatatatttgtacatttattaattatttgtattattattttatactctaattccgtttttgtcatagaaagtaatctattttcagctttaaaaaatgtgttatgactttgtttttggcctaacaggtggtccataaagaagaaagttgtatgagctattgagaaggctgtgtatcctgatgttgttgaggagtgttctctataccttcattagaaataattgttttttactgccttctagtcccctgttcccttactaatattctgtcttgttttattattataacagaaaatgcattactgaaatagcctattataattatatttctctctatgtgtttattccgttttcttactatttgctttatatatttgaaaccctaatttgagacacacacgcacacaaatacacacatggataaacaaatttgtcataggtccccagcgaatgaatctacatattgtttaacatctttttgaagttttgacttaaattacattttataaaatatgacagtttttgacttaagatgtagcttgtgtaatactattgtgacctcttctgctctcatttggttaatatttacatgacatttctacttccatcttgccactttcagtctttttttgttattagatctcaactgactcttgtagaaaggcaagttaaatcttgatttcacaaaatttttaataaacttttttattgaaagaatgtctcttgattggaaagataattatacatataaaattttaaatagttttctgaaagagaaaagcttactaatgttattttattttttgttttatttgattcttgtatctttgtctctcattttcctttctgttttttttttttgtattaatatgctttcaggtttttaaaaattttcttttgtgtatctttacagatattttcttagtggtaccatgggggattctataaaaactctaaaagatccaacaatatatttgaatgtggtaaaaaaataacttaagttatatgcaaaaattcttcatcattacatctgctgctccgaaaatgctcttatatgtgaattttgaaattttacttatatatgtgtttgttataagtatctttatgtgtatcctagtttgtttgttcagcttttttatgtttacatcatttttcttttgataaatttttcagttactttttgtaatttttatatccaaaatttttattttttgctattttaatatttcttgttatcctcattttcctgatcttcagtagttgtctgtgtttccatttcacttactgtatattattatgttttatttatttctgtatttattttatctgagatggagtcattttctgtcaagctggaagcagtggtgcaatctcggctgactgcaacctctgcctcctaggttcaagcgattctcctgcttcagtctcctgagtagctgggtacaggtgctttccactatgactggctaagtttttgtatttttagtacagacagggtttcaccatgttggctatgctgaccttgaactcctgacctcaaatgattcacacacctcaggctcctaaattgctggtattacaggcgtgaaccactgtgcccagcatattttattttatttttgagacagtcttgctctgttgcccaggctgcagtgcagtggtacaatctccactcactgcaaccatcccctcccaggttcaagcaattcttgtgtgtcagcctcccaagcagcttggattacaggcttatgccaccatgcccagttaatttttgagtttttagtagatacagggtttcaccatgttctctaggctggtctcatactcctgacctcatgtgattttcccaccttaacctctctgtgttgaaattacaggaatgaccaccaaccctggcctgttcaatttatttggaattttaaaaattactttatatgctttttatagttgcttttgaaatgtttttcattgggccatgtttctctaatattttgtgtacattgcaatctttgattgagatttggacattgacaaaaagctacctgttacaatctttttataatatagctttgtcctggcatagtctgaaatcaatagtcttggctagagattctgggaatttctcaaacatgttcttaggatgtgtcttgtctaaattttgtgtttattgtttagttaaatggcttattttttttaataatcagtaatcacttgctgcagccattccctgtttggggtactgcagtttctctgcttctctaacatttatctttagactcagtagactcaaactgtcattccaatgtatatcaccacttctttaagcgttttatgtcatgggagacattaaccagtgtctaagaagcacatagaagccagaaataaagatgtatgtgccaatgtttttctttaaaaaaaaaaaaaaaagaattggcaacttacatttgtgtgtgtgtgtgtgtgtgtgtgtgtgtgtgtgagagagagagagagagacagaatgtcattctgttccctatgctgaagtgcactggcatgatcttggcccaccacattctctacctccacagttcaagcaattctcctgcctaagcctcccaagtagctaggattacaggtacctgttaccatgcctggctaatattttgtatttttagtacagatggggtttcatgatgttggtcaggctggtctcaacctcctgacttcaggtgatccacctgccttggtctcccaaagtgctgggattaaaggcatgagcctgggtggaaatttctttttctttgtttcgtttcttttcttttttttcctttcttttcttttcttttctccttccttccttccttccttcctttcttccttccctccttccctccctccctccctccttccttcttctggctctgctgcccagggtggagtgcagtggtgtgatcttgggtcaccgcaatctccgcctcccaggctcaagcaattctctgcctcagcttcccaagtagctgggatttgcccaccaccatgcctggttaattttgtttgtaaatgtaacctgtatttatcagaatctagcaattgaagtaatgtgttcttattgtttctttcagttatgtgttttcattttgcccaagatgaggttaattttgtttgtaaatgtaacctgtatttatcagaatctagcaattgaagtaatgtgttcttattgtttctttcagttatgtgttttcattttgcccaagacctttgtccagagcagagcctaaaagattccttccaaaaagtgatagtgacaagatatgaaaaacgtgaatatggcaatttagagttaaaaaaaggttgtgaaagtgtggatgagggtaaagtacacaaaagaggttataatggacttaaccaatgtttgacagctacccagagcaaagtatttcaatgtgatacatatgtgaaagtctctcatatattttcaaattcaaacagacataagataagagatactggaaaaaaacctttcaaatgtatagaatgtggcaaagctttcaaccagtcctcaacccttgctacacataagaaaattcatactggagagataacctgcaaatgtgaagaatgtggcaaagccttcaacaggtcctcacaccttacttcacataagagaattcatactggagagaaacggtacaaatgtgaagattgtggcaaagaattaaagtattcctctacccttactgcacataagagaattcatactggagagaaacggtacaaatgtgaagattgtggcaaagaattaaagtattcctctacccttactgcacataagagaattcatactggagagaaaccctacaagtgtgataaatgtggcagagcatttatttcatcctcgatcctttatgtacataagataagtcatactgaagagaaaccctacaaatgtgaagaatgtggcaaagccttcaagctctcctcaatccttagtacacataagagaatccatactggagagaaaccctacaaatgtgaagaatgtggcaaagccttcaggcgctccttagtccttcgtacacataagagaattcatactggagagaaaccctacaagtgtgataaatgtggcaaagcatttatttcatcctcactcctttataaacataagataagtcatagtgaaaagaaaccctacaaatgtgaagaatgtggcaaagccttcaagcgctcctcaacacttactatacataagataagtcatactgaagagaaaccctacaaatgtcaagaatgtgacaaagtcttcaaacgctcctcagcccttagcacacataagataattcatagtggagagaaaccctacaaatgtgaagaatgtggcaaagccttcaagcgctcctcaaaccttactacacataagataagtcatactgaagagaaactctacaaatgtcaagaatgtgacaaagccttcaagtactcctcagcccttagcacacataagataattcacagtggagagaatccctacaaatgtgaagaatgtggcaaagccttcaagcgctcctcagtccttagtaaacataagataattcatactggagcgaaaccctacaaatgtgaagaatgtggcaaagcctttaagcgctcctcacagcttactagtcataagataagtcatactggagagaaaccctacaaatgtgaagaatgtggcaaagcttttaacttgtcctcagaccttaatacacataagaggattcatattggacagaaagcctacatagtgaagaacatggcaaatctttgaaatattcctcaacccttaataaacataagataattcatactggagagaaaccgtataaatgtgatgactgttggaaagcctttgaccacccctctactcttactaaatatgagaatttatatgaaacataactcctacaaaaataaagaatgtgacaaatcattttaaggaagttctcaacccttactacacataattcatactggacggaaactctacaggtgtgaaaaatgcagcaaagcctataacaagttctcaattctttttttttttttttaagaaggagtttcatgcttctcacccagcctggagtgcaatggcacgatctctgctcactgcaacctcttcctcctggttcaagccattaacctgcttcagcctccaccaccatgcccaactaatttttgtatttttggtagagacagggttttgccatatttaacaggctggtctccaactgtgattcacacaccttggcctcctaaaatgctgggattacagtcatgagcatccatgcccagccacaagttctcagttcttaagagacatggtgataattcatgctgaagaggaactttacaaacttgaaagatgtgacagtgcttttaccaccacctccaacttttctgtacataaagatgattatactagtgtgaaaccctagaaataatagaaaatttgacaaatcctttatatggttgcaagacttgattgtaggtaagataattcatactggcaaaactcctacaagtgtgaagaatgtgggaaaactttttaatcagtgcatacaccttatttcacaggaaagctagtatccttgagaaaaattgcacaattataaaaaatatggaaaacccattaatgcctactcacatcttacccaacagaaggtggttcacagttaatgaaagcatttaaagtgcaattatgctcaagaaatctttcagaaaatagaagcctttaaagtgaagaagagtattctgaagacaaccattacacatataaagggggttgtattacctttacttgcatcacagatttcattgcacacattttgtactagaggaaaaccctgaagcagttgctccagctttgttcaacaacagggaatttatgttagagaagaatcctgcaaatgtagtgaatttggaaacaaattttttttcaaaaactacagcttagaaaacaccagagagttgatactaaaatatatgtttgcagaaacagtaaatataaaaaatatttaattcaaaatgaattccatgtaaatatcagagaatttacagtagaataaggcactgatacttcagacattacactaaaacagtgttgagtataaaaaagaatccacaacaaaaattgttagataaattatatatagctttaaaaggttttttgaagcattgtaattacattgaaagtatacttgctttcttgagaaaaaatttttgaaaagtgaataaggtaatagagctttcaaatttatgctgttactttatttctattcacatgtgaaagcatgtgatcaattgatgctgcatcagagatattacagattctttattgggcattccttataaccttttctattaaagagaaaggatattaaaatgtaagatgcatgatgaaaatataagtggacaggctgttcgtatttgacctatattaagtaatgtataaggtagtgttcagagtaatacttttctacattatagtgagagaaattatgaattacagttaaaggtatattaaattactgtattattttactaattttatgtaataaaatacactacattaaaaaattgttagattgtgtgtgaagttaattttgttgtatccatttatttttttttttgagatggagtccactttctcatccaggctggagtgcagcagcgcaatctctgtgtgatcattgcaaccttcacctcccaagttcaagcgattctcctgcctcagtctcccaagtagcaaggactacaggtgtgtgccaccatgcccggctaattgtttcaccatatcagtcgggctagtttcgacctcttgagctcaagtgatccacctgccccggcttcccaaagtgctgagattggcctagttttattttattttttaccatattaagactattttgcatttaatgaagccatattatgccactaactttaacctatcccaccttactcaagggtatagttacaagatggtagcagtatactatttggtatatagtagaataacatcattagtaatcactttgccagtggctttaaattaattgagttgaagaatatttttcccataggttaaatttttattcttacagaaatttattcttagtatttgtgggtatatagtatgtgtttacgtttatgctttatatggcatactgtgattcaggactacaatatgtagtaattacattagggtaaataaggtatccatcacgtctagcatttatcctttgtattacagtgtaattatacacttttagttatttgaaaatgtacaattaaattttaattgactacagggttatttttatggtcgtaataaaaattatacagaaatataaaaagaatatggccagatgaagtggctcatgcctgtaatcccaaccatttgggaggctgaggcagctggattgcctgacgtcaagatttcaagaccagcctggccaacatggggaacccctgtctctaaaaatataaaaattagccaggcataggagcacctgcgtggaggctgaagcaggagaatagcttgaacaagggaggtggagtttacagtgatccgagattgcaccactgcattccagcctaggcaacatttctgagtcctgaaaaattattaataaatatttgttacatagttttctataaacttgtggtttctctgcctgcaaacacaagagttttagttttaattttcatagagtgaaatatccacatattactctgaaggtaaaccttaggtgtaagaaaaatataaagtgagtaagtgtatttgtgagtttgctttggtacatattttcagaagaaaagcacaattattgaaacaaaacaacttattttaatttggtgaataacagaaaacaccttcaaaatgttgaaagcaaatctacactttctgctttgtattgaatttattaatgtaaaattttatagcttatgtttcaaattctttccagaatctgcctattgaagcacaggcaattttgtctccataaataacactcttgagtacaacaataaaagccctcttcaaacaaacaaattatttataacacttattttaatgaaaatgtaaccaaaagtatataattgggtatatttttgttgttctatgtgtgtgcgaatgtataaattggtacataaggacaaaataatttaagccagaaaaaaagatgttagctaatatttgtaatgaataaaactggaaagtagttaattattatttgcacataatgtctttgtttacgtagataacaaaacagcagaaagactattttaaaattttattcaagtgggtaggtaacattctaagataatacgctggattcccagtctgttgcacacctgctgtgtaatactttttccttgagtgtaaaaaaatgtgcaactggtgggaaaatcactcaagaaattaggttactcatgtgttgactttgtgtttatcaaaatggagattgtcctgactgtgctaaacttaatcagaggtgcttttaagagaaagacacatcatagaaaaacacccctgcttgcctgaaagtaagtgacttctaggtgggccatgttgcaagctgcttatggtgaccacatggcagaaaacatatttgtacattgttatcattcctgcccttctgcatgttgcttccagtagggagaatctaaggatcctatgacagggaaaaaaaggaaatctcattcatgcaagaaataatcacctctcacctgggatagcttaagagaagcaggagaccacaacagaaccacataaatgggaggaaaatggtaacctgggtaaaagtgctctctggcattatggaacaacatttagtaagctgtagtgaatggtcagcctctgggataccaatagtttaccaacaaggctgaactcattctaattcaatcagcatgtctgcatttacactatccattacagaaataccatgaagaccagtgggtaatgtcctagaattgaacttatttcaaatcatacctaattgtttttcacatttgaaaaaccttaaaaacaatgaattcataaataattaacttctaattatagaggattctactatactgtaatacaagattaaagtgtaaacaccttaagatttcttgaatgcatgattggttatgtagtttattttaaataattaacgtgataaaagtaacaaatagataaaacattggaaacggacaaaattaataaaaaccacatcttttcaatggcttggcgtaattgctatgcttttggaaatggccagattactaacaagaaacaaaaacaagattttggctttgctcagtcattgtttttgaccttctgaaatctaaaatccaggccaaagtgttgaatgggagtattttataggtggcttccttgggtttccaatgcaatgaagggaaaactttgataggcaggaaaatgcacactatatacacacattgctcttctctgatttgctttaacattgaaaaattgaagattgtaaatgtagtctcaattagagtaaattaacaaaagatttgtttttcaaaaagcaaatgtataaaattaatgggtaacagatgccattagctgctaaaaaatagtatgactaaattcagtaagtatctagccatgcaaataacagcccaattaaatgaagaccctcataggtgcatgtggaaagcattgctgtgcagtgtggtgcctccactcagcattttcttctacctcttcacagagaaaccagtttcccctgagtgactaaggatgcatactgggagctgagaatgctgtgttcagagtgattactgaaaacatggttaacacacttcttccatatgataataaaatgatataaatctttctctgcctcggaaaagcttttagtaaaagattattcaatttaggttcatgaaaaatgttaaattccagataatttagacacttaaatgtcaatgaaatcccataaaacatatttgaacagtgtttgacacgagtcgcaccgaaacaaatgctcttcacgatcattgttaaagtagcaatagcgccacgtgctttcctgggaactgctggcctgttttccactcatacaaagtggagaaggctttgaaatagcaaaggagggtgacataaattgaatacttatatgaaatttttaattaaaaatagcatttgatgttatacaactataagtgagactattagtgtgatgtcatattcttaattatattgacaaaataaccattcacagtattcctatttaaaataacatgttttgtcggctgtatatttgctagcttttggttaaatagtaccagagctcaatagcaatcaacaaaatgaatctttattttaccgcaagcattagtgatgcatatgcctgtttttcttaaagttcattagctttttgccttttccggttgcagcgccgcgcggtgaggttctctagtccacgctcgcagccatgccgtccaagggcccgctgcaatcggtgcaagtcttcggacgcaagaagacagccacagctgtggcgcactgcagacgcggcaatggtctcatcaaggtgaacgggcagcccctggagatgactgagccgcgcatgctacaatacgagctgctggagccagttctgcttcttggcaaggagcgatttgctggtgtggacatccgtgtccgtgtgaagggtggtgctcatgtggcccagatttatgctatccgtcagtccacctccaaagccctggtggcctattaccagaaatatgtggatgaggcttccaagaaggagatcaaagacatcctcatccagtatgaccggaccctgctggtagctgatccccgtcgctgcaagtccaaaaagtttggaggtcctggtgcccgtgcttgctaccagaaatcctaccgataagcccatcatgactatcaaaattcacctgtataataaacagtttttgagggattttaaagtttccaggaaaaaaaaagttcattagctttttatgaaggatttatccttttttttcagtgtgctgtttattgctgagaagtggctgccctgccagaaaactgctattctcagctgtaaccacattgactaatagtgagtggaagtgcagtggataaaaagcaaatgtgtcttctctgtatcttttttcatttattggctgaagaacaggaggatgcggaagatggaagaaaatataatctctgaaagataatgaagaagctctcctaaatagaagaaaacctcataggggatttttttttcatcattttactctctgcttctatgcgtttaaattttttttttttttttttgagacagtctcgctctgttgaccaggccagagtgcagcggcatgatcccgactaactgctccctccacctcctgggttcaagcgattctgcctcagccttctgagtagctgggattacaggtgtgtgccaccacgcctgactaatttttgcatttttagttgtggtgcggtttcctcatgttggtgaggctggtctcgagctcctggcctcgtgatttgttcaccttggccttccaaagtgctgggattacgtgcatgagcccctgcacctggtgagtttaatttttttttttttacactttacatagaaataggattatgtggactgggcacggtggtctataatcagcactttcagaggctgaggtgggtggaccacttgaggttaggagtttgaggccagcctggccaacacggcaaaacactgtctctactaaaaatataaaaattagccaggagtggtggtgtgcgcctgtaatcccaggtatgggggaggctgaggcaggaaaatcgcttgaaaccaggaggcagatgttgcagtgagccgagatggtaccactgaaccatcgcgtgcctaggcaaaactccatttcaaaaacaaaacaaaaaaattttgtgtgtgtgttttcctgtgctggcttattttacttagcataatatcgttcaggttcatgaatgttgttgcaaataacaagactcttatttttaaggactgaatagcattgcattgtgtacatacaccacattttctttttccatttacctattgatggacatctaggttgattccataccttaggtattgtgagtaatctgcttctttccttctcttttgttttgtttttgttttgtttcagatggagtctcattctgtcgctcaagctgaagggcagtgccgtgatcttgacccactgcaacctccgcctccaaggttcaagcaattctagtgcctcagcattccaagtagctgagattacaggtgtgcaccaccaaacccggctaatttttgtatttttagtagaggcaggctttcaccatgttgaccaggctgattagtttgtatatttctttcttcctttccttttttatttctagaagcatgttaattttaaaatataaattatgacatgtaaaagccttcatttctctgtctttgattactattatggctgatgaaaaaataagcttttttgaaatttcctggataaaagttattactttatattaacataacttgagacaatgtagaaatgaaaatgaacatttgatagtaaaacagcaattatctagctcctggtagtcatttagtctctcacccgctctttagaacttccaccaagacaagaactctattttttttccaagaatgtgtgatgtaaaatcacactcttatctttttgtttttgtggcagaagttgggtatttaaggttatgaaaaaaaagtataggtctccttttagtagacaggtgatgatggaagcaaatataatagtacatggtatttggccacatttcaaatgggtgatagtgaacattcactgaagtgtcatagatggctcttatttgccaggtcaaatcttctttgcgagaaagtctcagccaactgttgtcaagcatttctggtggttcctagatacatgaacaaaacctcactagactggtttactgagagcagaattaaaaacacccgggtgccaggttattaaaaacatttttacatttttacatttatggaaaaaaaaatgtgatgtggtgtgtggcttggtttgaatacatcttcactgagctaagtagctgattgaatttacctaacctgaaggaaaaaaaaagaaaaaagaaaaaacctacactgaaaaaacacacatggaactgcaagacagtgattaagaaaaatgtttactcataaactctggtacgcaacatcgatgtatcattaaaaaagtttgtcagtttgggcatggtgtctcacgtctgctatctcatcactttgggaggccaatgcaggtgtatcacctcaggtcatgagttcaagaccagcctggccaatgtggtgaaaccccttctctagtaaaaatacaaaaattagctgggcatggtggcacatgactgtaatcctagctacttggcaggctgaggcatgagaattgcttgaacctgggaaatggaggcagcaataagccaagatcacaccactgcactccagcctgggtgacagatcatgtctctgtcaaaaaaaaaaaaaaaaaaaaaaaaatatatatatatatatatatatatatatagtctaggtaactgtaatatgtaactgttacggtgtactcaccaactgcagatcttttgaatcattggcatgcactgtgtggcagtaaaatttcagagaatatgcagtatatttatacatagaagattctaataagaaactttccataaggaagcctttaaaagaaacttgagttactttttatgttttaaatgtatgctattcttacacaaaatgaaactgctgcaatccaactttagaagcaaagaatagtcttacattgttaaatatagaaaatatataactattttaagaatagtgttagaacctctgatatgtaaaacaaatattaggaaaaaactatggtattatttgatataggctgaagtaagtagatgaaaattctataattcctttttgcctgcagcaaatttaaatttataagtaattattttagtaaatatggagtgcctactaattatctaatttatttcaggcataccatgcaaattctagcatattgtcctaactgtataaatctaaaattatagacaaatttgatatagaaaatagaaagtaaaaatgtatagggagagtgacatcagtaagatgaaaagactaaaagtgctcattttcatctccccttacagcaaaacaatgtcagccttccctggcatgcctttattagagaacgagacattatggctcacacctgtaatgacagctacatggtacattaaggttatggaactgcttcaggccaggatatggagaccagcctgggttatgtagcaagacgccatctccaaaataatgtctctaagagttatttgagatccagggttgcagttgtgaaacactgttaaagcttaagattgagaagtgttctattcagaaggcaggtcctcattcatgtgggaaactacaggaccgctcttcctggctacagaccaggatcgggttcacccaacttggtcccagtaagaattcagaacttactctgtaaccatcccaaattcctcccaggtacagtctggcagaggtcttgccattccagacacttgggaggaaggtactcgtttacagccatgtagacaggcctgcagaacttggcctttactgtggtccttgaagcagtttaatgactcagtttcacttacctgagccacagttcatggccagttctgcctacatagaaacctacccaattacctcaggaaatgctctctcatatacagtgaaagccacactcatccacatcctgatacaaggcccaccatatgcagagctgactgaaaaaacatgccctagtgtctgccctatggagcaaagtcctgaaggatatgcagtgtgctcaaaaataaactgggaattacaactacccaagcccctgtaacaagccaactgaaggtggaccctagtgcagacccagcagccttgtgataaagctgcaacccctcttcactacaaattcagagggcatctcatcactctaagggcccaacaaaagaagatctttaccttataaaatcagtatatgaaaccctgaagaggtgtttgctccatcaaattcagacaccaatacaaagctatattgtgcctattgccaatgcttctattttaatgtagcactggaagtatgtggccgaagaactagtcaaagaaataaaaaaatccattgaaattgaagaaaaataattaaggtgctgctgtttgtagatcatacaatcttatatttaaaaaaaaccataaacagtacattaaaacctgtctaaactaataaatacactcagtaagttagcaaaatataaaattaacatacaagtatatgtatggtttcacacacttaaactatctaataaaatagaggaagaaaataatcttatttatttatttattttgagacagtctcagtctctctccaggctggagtgcaatggtgcgatctcggctcactgccccaatgtcagtgaaataaatggttaattgggaatagaggggcttggggaaagcaatactgggaagatatctcaatcctggcacacactaccattattactgttttcctttttttttttttgacacggagtctagctctgccaccagactggagtgcagtggtgcaatctaggctcactgtaacctctgcctcccaggttcaagtgattcccctgcctcatcctcccaagtagttgagactacaggcacatgccaccatgcccagctaattttttgtatttttagtagagacgggatttcactgtgttagccaggatggtctcgatctccagacctcatgatttgcctgcctcagcctcccaaagtgttaggattacaggcatgagccactgcaaaaattttattttctaaagcattaaatcataaatttctgaggaaaaaattaaccaaggagggaaaaaatctttacaataaagaaaaaataaaaaaattagagaagatacaaataaattttaaaatactttgtctatggattgacataatattattaaagtaccacattatccaaagtaatctatagattcaataaacttcctatcaaaattgcagtgattttttttcacagtaatggaaaatacaattctaaaatttacatgaaactaaaataaactttgaattgccaaagcaatcatgaagaaaaagaacagagcaggaggatatcatacttaaaatttcaaactatatttcaagactatatagtaataaaaacagaatgtactgtgcagagaaatgaattaaaaaaatgcaacagaaactactactctcacacatttcagacttgatgcaaaaagtgatctaatgcataattttcttttttttttttttttttttttttgagacggagtctcactctgtcacccaggctggagtgcagtggcataatctctgctcactgcaacatctgcctccagggttcaagtgattctcatgcctcagcctgcctagtagctgggattacaggcacccaccaccatgcctggctgatttttgtatttttagtagaaacaaggtttcaccatattggccaggctagtctcaaactcctgacctcaggtgatccacctgcctcggcctcccaaaagtgctgggattacaggcgtgagccaccacgcccagtctatgcagtctgttatatgtcatgaagatgaatttggctctccctgtgaagctgaaagaagctcagcgaaagaaaagtagaatccttatttaaaagcatcagacagaagatgcccctttgtgagagccaattaaaaacaaaaaaataaacaaacaaacaaaagcagctttccacgaatgatttcctttggaacacagcttcccaaatcacatttaaggactgactttctctttgaccttgggacctcttatctgtgttgtctgttgtattcattttcttcttttttttttttgttttttttgagatgactctgtcacccaaaatggagtgcagtggcataatcttggctcactgcaacctctaccttctgggttcaaagcgattctcctgcatcagcctcctgtgtagctgaggttacaggcgcatgacactatgcttggctaattattgtatttttagtagagacgtggtttcactgtgttggttaggctggtttcaaactattgaccttgtaattcacctgcctaggcctcccaaattgctgggattacaagtgtgagccactgaacccagcctgttgtattcattttcactctacctatctgggggtttggcaatcatctcatgtctcttcatagtcaaaggttttttttccttgacaacaatacctgtttattaaaaataaataccatgaatcttgctcatattcttcaattagaagctagtaatgtgctaagcagagaggatgtaataaaatagtctagtaaattaataccaaaatactaattcataatagaaatttctaaatatttagaaaatactttcactttttaggtttcttaattttactacctggtactactgaatcaaaaattggtggtggcaattagattttcaggtgggggcaacaatatttcatgccagtaaattttggaattgccactaatttagagtgaagaatacactcaactgaggaatgtggaaagtttggattaagatgaaacatcttgaagaaattatcttctaaatgaaagaatcctgaagattttctggaaaaggggcatctgaaacacttttatgcaaagaataaagtacccagaaacattccacaaaaaagggaaataaaacttttagggtatattatgaattatgtattaaagttatactcacaaaggaagaccaagtttctgtagttctgaaacttcacatccctatataaattccgctgtgcagtgtccaggcaatgccactcctccagagagaattctatggccacgtctctaaactgcaatggtccctggaaaacacacacacacacatttttaccaagtggccataggtggaatttttaatttgacttaaggtgaaatgaaagataaaagacaaatggttctgacttataagactcactaaaattatccaataaaataattttcatcacagaaatattatttaatgtattctctaactctgagaaaaaacagcagcataagatacacaacatcagttcatatgtgatatttttctagataataaagtataaaattaaaggcataaacgtacatttttgagtgctatttcatcatatgaaatgagttgtgaatatttttcaaaaggaaaagatgagttagaaggcacctcaaattttaatatatacaataagctgaagaccttctcatgcaggtttttttaatatttttccgcagaagagctggaataaagtctgatttatttatttatttttagttttttggagatggagtttcatgcttgttgcccaggctggagtgcaatggtgcaatcttggttaactgcaacctccacctcccagattcaagcaattgtcttgcatcaacctcctgagtagctgggattgcaggaatgtgccaccatgcctggctaattttttttttttttttttgtatttttagtagagatggggtttttccatgtttgtcaggctggtctcaaactcctgacctcaggtgatctgcccacctcggcctcccaaagtgctgggaatataggcatgggccaccacacctggccaattttttgaatttctaacaggctcatcagtaatgccaatgtttttggctcaagaaggatatgttgtcaaacatccaggaagtggaagtgtcggtgtttttcccactttttctagcctgtaaacaaagataagagtcttcattttccaaagaaaaatatgtagaaaaaaataagaaaaaagggcagctgccagattgaatgtgatggtttatgcacgccagcggcataaacatacctaataatacagcgaaaaataattatagtgaaaaatcagaaagctatttcaccaatcgaatcattaactattaactgcactaggacaaatttttattgtgtgctaatgcacccagaagaacacagcatcactcttgaaatattcctccccaaaaaagtaaattatagtctgaatttatgcaaacttcaaaacacagataatgcctatgttctgtaatttttagtagtaattttaagtaggcttcatttaacaccctagagagcaggtatctcctaataatttttttcagaactttctgggtaataaatgccatcccatttaaataagcattttttttttttttttgagacagagtttcgctcttgtcacccaggctggagtgcaatgatgcaatctcagctcactgcaacctccacctcctgggttcaagcgattctcctgcctcagcctctcaagtagctgggattacaggcatgcgccacaatgaccggctatgtttttgttttgttttgtttttttgtatttttagtagagatggggtttcaccatgttggtccggctggtctcgaactcctgacctcaggtgacccacctgcctcagcctcccaaagtgctaggactacaggtgtgagccactgcatccagcctaaataagcattttcttaatcctgttctgcatagagctaatttaacacagagatggaccctaaacattacatgtccaccatctttactaaggaccacagttttccccaatagaaatcttgagtatccacaaagggaacatttttaatgttatgggtcataaattcttgctgagaattttgcatggcatataagaagctatcacgttgagaatgtagagaaggctctgggatataggaaagaaacatttttcagagacccttgactatcataattttaacaagtagttaaaccaaactcattagggagcaaaaacacaagcagagaaggaaaggtttgtgagtagtaaattcatggcagtccaggaggcagagtggacacagttcttcatctgacacctgtttacttaaagaaaagccatttttttttctttctcatttttctctggaattttttctgagatgagattctctgaacaaattacacccccagcttgagaatatgcctttaaaagtgtcagtgccacatgtttacctgctagcatgacatcaactggcagaaaaacaaagacagaaaaagtccacccatttctgtcctttaaaacaatgagactcagaaacaatgagctgctccatgaaaataaaaatgtatctcttttgctgtcctcaggtgccctcccctgccacagacaccagtaatttctgctacagtaatggaaatatgcaccacactgacctgtccctaccaaattcaaacagaacaggccctgtgaccaccctttagtgcaaaggtggaacttaactctcatgaatgtgttttgaagcaatcatacttgattctggtctcaccttagagccatatgaggcccttcgttaaaacaacatggatgcttccacccagaacaataaacaagctgtggagagggcataagagatttctgcaaattagccatgtgatcctaatgagaagcctgggctgataatcactaagttaatcattgcctctcaagctttaacgagcttctaaatcacttggtaattttggccccactttatgtaaagtgattctggaagcttgaaaagggtccaggaatggttgttttatacaagtcccctgtgaatgctgatgttgctcccccgggctcattattagcattagtcagagaagcaggcacagctcagggtcccttacccttagcacttttgtcacaaccaaatgcttctggcacaaataaggacaacccatctccatcctaaagttttatattatttgctggctctttaaagtttacagatgaaacagagacctggaatctacacttcaattagcagcaattacaaaaggatttgtaaagacaacaagagagggacagagagtgggctgatacaaagttgtctgttagaaatttttatttatttaaacaaataactttgattattgattagatatatatcattatggtttagggtatgaaatataatgtccaatatggcattattattttaatttataactacttgtggcaatagcaaacattttcaagaaatgaataaatagttcaaagtgggagaaagacataactgcactttcactttaatgtctctctgagtttgataaccagaaagacttgcatttttcagataaaagttttttatttcccaaatctcaagacctggattcaaaatttggagctacagatttagggcctgaatggctggagttgcagcaggtgttaactgcacatttgtgggcattttggcaagaggaggaatgggaaagtggagattctcatgtctatatgtctaatcaatgcacagatgctactgtgattgggtttctgggctccatagtcactgaattgctttcaggtttgaagataaaagagtcattgaaaaaggtgaaatgactgattgctgcccgtgaagtttgtagaaatttggtctagcttctctagaaatgactgtagaggactacagataacaaataggctgagacacaattctgcctgcatatttaagggacagcatgcactgtgctgtgcacgtgtctgttaactggaagcctgagagaaaaagtcccctctagagtaaattctggttggcaccttatgtgtttatatcatgtctggtaattctagacagtgtttggaaacaataattaaaagaaaatttttctccagtcccagagaaactccacaataatagaacagaaagaaaatgcttttattacacaattaaacttgaatgtgatgtccatatactcaatctgcttaagagactgcaaagacagaaagatggtcaccataattagttcacaagtagaagaatttgcagcaccatgtcatacatcgttcatcctaaattcacctggagattgaagaggccatctgtgtatactaattgcttatattcaatgatgataaacttttcacatcctcataacaggaggtagtttagtagcttgaagccaggtgtctgctgaagctaggctttcactctgctacaaaaatggttgaatagtgttctatctttttggctatttacattttagagctgtggctctgtactccctggcactgggctacagcactcctgctcactttctcctggttgctactgtcttctcttgacttctaccatctgccactgaggcacagcccagagcacagctcacattttatgtgaatcccatttgccacagcagcactatagtgtcacatcagagagggaagcctgagctgcaggaggagagcctgcaggcctcctgggtagaattacaccttcacaataatcaaaataagaccagtgtttcagtctcaggttctacttataatggtgacaaggaaataatgctgctaaatttccagcatgagtccaaatagagatagctccaaaagttctttctgtgacagcccacctcattgagacaccatggaatactaatagggcttctgaaacagacaaagcattggagagaaaaacagatctccatctgggcaagatgattttgacagaagttaaaacgatcttaagaaaaagctcaggctgtctctgtctctccctctccctctccctctccctcctttccacggtctccctctgatgccgagccgaagctggactgtactgctgccatatctgctcactgcaacctccctgcctgattctcctgcctcagcctgccgagtgcctgcgattgcaggtgcgcaccgccacgcctgactggttttcgtacttttttggtggagacggggtttcactgtgttggccgggctggtctccagctcctaaccgcgagtgatccgccagcctgggcctcccaaggtgccgggattgcagacggagtctggttcactcagtgctcaatggtgcctagactagagtgcagtggtgtgatctcggctcgctacaacctccacctcccagccgcctgccttggcctcccaaagtgccgagattgcagcctctgcccggccgccaccccatctgggaagtgaggagcgtctctgcctggccgcccatcgtctgggatgtgaggagcccctctgcctggctgcccagtctggaaagtgaggaggtctcttcccggccgccatcccatctaggaagtgaggagcgtctctgcccggccgcccatcatctgagatgtgcgagcgcctctgccccgccgccccgtctgagaagtgaggagcccctccgcccggcagccgccccgtctgggaagtgaggagcgtctccgcccagcagccaccccatccaggagggaggtgggggtcagcccccgcccggccagccgccccgtccgggaggtgaggggcgcctctgcccggccgcccctactgggaagtgaggagcccctctgcccggccaccaccccgtctgggaggtgtacccaacagctcattgagaacgggccaggatgacaatggcggttttgtggaatagaaaggggggaaaggtggggaaaagattgagaaatcggatggttgccgtgtctgtgtagaaagaagtagacatgggagacttttcattttgttctgtactaagaaaaattcttctgccttgggattctgttgatctgtgaccttacccccaaccctgtgctctctgaaacatgtgctgtgtccactcagggttaaatggattaagggcggtgcaagatgtgctttgttaaacagatgcttgaaggcagcatgctcgttaagagtcatcaccactccctaatctcaagtacccagggacacaaacactgcggaaggccgcagggtcctctgcctaggaaaaccagagacctttgttcacttgtttatctgctgaccttccctccactgttgtcctatgaccctgccaaatccccctctgcgagaaacacccaagaatgatcaattaaaaaaaaaaaagaaaaaagaaaaaagaaaaaatacaccctggcagaaaacttctcgaatgtaagtaaagtgggagttttcaacttgcccacctccttacaaaaacatgcaataagaatgtgctagatataaagcttacaaatgtgagaaatacgggaagtttttcaattttaacaaatactttcaaagtcatgtgaaaattctcactagaaagaaatccaataaaggcaagttgaggcattaaaaaaaaaaaaagaaaaagctcagaatacatataagattgactaagtcagccagaaaataatcccctaaaagaaatttctctctaaacacccaatgtgcacagctactctcagcatgagaaacatgagctttatgaagaaaggtggcagattttcagaagaattttataaaagtttcttttccatctctgctgctgtctcatctcctagccattgaatgggggttctatattgaaatacatctgacaacttccaacaacactttttgatcaagaaatagaatttgactatgttcgtatagtggaatatattagaacttgtaacatagctaactgaatagctattatggtgtttgggtggccacatcacctgtctttatttgtccggtaatagcagcattccaatttaaagaaataaaagataccaaaattgtgtttacttttaattattcctattgaataaagtaataagcatgtcagactgatatctatcataacaataaattttgtttggatattatattagatataaatatttaagtatgaatacttttaatgaactagtcataatgtatgtagcatttttaaaaattgtaactatacttcagttaaaacactttatatttcaaaagcataaataacaatattaaaataacaatttaggtgattcattcaaagtaagtattggggctttatgttcatactattgtagaaaatactgcttatggctgatgcctgtaatcccagcacattgggaggctgaggtgggtagatcacctgaggtcaggagttcctgatcccatctttactaaaaatacaaaacttacccagggtggttgtgcacacttgtaatcccagctacttgggaggctgaggcaggagaattgcttgaacaagggaggaaatggttgcagtgagccgtgatcatgccactgaaccccagcctgggcaagagagtgagactgtctcaaaaaaaaaaaaactgtttaatttttatgaatgcaggttttctgcaaacactacacataactatgctaattgttctgaagtaataaatagaaagcaaggcacaactacagactccactgttcagtttatgcactgaactgttcttgcttttgcagtgtaagtatttctgcctgcaaatactggataattaccttggatcatcagatttctatcaaaggaatttagtatcttttagtctttatcattttgtattgctaaatttatctgtgtgttaagcttctatgtgctcttaaaatgaggttttatctaaacaaacctgtgtctactttaaaagactaaacatgaaaaaactaaacttttcagaaccaaaaacaaagcaataaatctgaagtactagatagtctggagtgagatttatttagcttttttttttttttgagatggagtctcgctctgtcaccgaggctggagtgcagtggcacgaactcggctcactgcaaaagctctgcctcccagcttcatgccattctcctacctcagcctcccaagtagctgggattacaggcaactgccaccacgcccagctaatttttttgtatttttagtagagacggggtttcaccgtgttagccaggatggtcttgatctcctgacctcgtgatctgcctgcctcggcctcccaaagtgctgggattacaggcatgcaaaaccgcgccctgcccttatttagctcttaatatgatttacatatatttcaaaaaagcagagaaaaatatctacatataatctaaatcccttaagaaaagagagaatagcaaaaaaatttttggaactttttaaagagttttgaactcttggacatctgaattttgcacactatatgcacttgaaagaatgttaatggggaaaaagcagaagagaaaaagacgttataaaaaaatccatgagtgcacaacacctatgaaacagaatagagagcccagaaataatgcctttcacctgcaaccatcagatttctgacaaagctgacaagaggaatgtgggaagaattctctctttcataaatggtgctggaataactatctaccactatgtagaagactgaagtggaccccttcattacaccatataaaaaaatcaactgaagataaattaaggacttaaatgtaaaacttaaaattataagaaaccctgcaagataacctaggaaatagcattctagacacagaaacaggtaaagacttcatgatgaagctaccaaaagcaactgcaacagaagcaaattgacaaatgggatgtatttaaacttaagagcttcttcacagcaaaggaaactatcaacagagtaaacagacaaactagagaataaaagaatatatttgtaaattttgcctctgaaaaaggtctaatatacagaatttattaggaacttaaacaagtttacaagaaaaaaacacactcattaaaaagtatgcaaaaaacatgaacagatgcctttcaatagaagatacacatagggctaacaagcatatgaaaaaaaaatgctcattgctaatcattagagaaattagaagagaaaccacaggctgggtgcggtggctcacgcctgtaatcccagcactttgggaggccaaggcaggcagattacaaggtcaggagatcaagatcatcctggctaacatggtgaaaccctgtctctactaaaaatacaaaaatcagccaggtgtggcagtgtgcacctgtagtcccagctactcaggaggctgaggcaggagaattgcttgaatctggtaggcagaggttgcagtgagctgagatcacaccactgcactcctgcctgggcaacagagcaagactccgtctcaaacacacacacacagacacacacacacacacacacacacacacacacacgcagagaaaccacaatgagataccacctcataccagtcagaatggctatttttaaaaagtcaaaagataacagatgctgacaaagttgcagagaaaagggaatgcttatactcctctggtgggagtgtaaattatttcaacaactgtaaaaatcagtgtgacaattcctcacagaatgaaaaacagaattatcattcgactgggaaacctcataattgagtatatacccaaagaaatatgaaatattataaagacacatccacatgcatgttcactgcagcactattcacaatagcaaagacacggacagactaaatgcctatcaatggcagactggatcaagaaaatatggtatggtcagatgcggtggctcatgcctgtaattccagccgtttgggaggctgaggcaggtggattgcctgagcttagaagtttgagaccactctgggcaacatggcaaaattttgtctccacagaagatacaaaaaaaaaaaaaaaaaaatggccaggcttggtaacacccgcatgtagtcccagctacttgggaggatgaggtaggagagaattgtttgagcctgggaagttgaggataaggtaagccaatatcacaccacagcactctagcctgggcaataagtgagaccctgactccaaaaacaaaagatttagtaaaaacaaaatatggtacataagcatcctggactactctgtggccattaaaaacaaataaccatgtcctttgcagtaacattgatgaagctggagaccattattcttacaaaacaaatgcagaggctgggtgtagtggctcatgtctgtaatcccaacactttgggaaaccaaggtgagtggatcacctgaagtcaggagtttgagaccagcctaaccaacatggagaaatcccatctatactaaaaatacaaaattagcagagcatggagacgcgtgcctgtaatcccagctactcaggaggctgaggcaggagaatggcttgaacctgggaggcagaggtgagctgagaacacaccattgcattccagcttgggcaacaagagcaaaaacaaacaagcaaaaatatctcaaaaacaaagaaacaaaacaaaaaaagaaaataatacaggaacagaaaatcaaatgcatgtcattatttataagtaagagctaaataataagaacacatgaacacaaagaggagaaaaacaggcactgaggcctagtagagggtggagggtgagaggagtaagaggatcagaaaacatacctgtttggtgctatgggtagtacctcagtgacaaaataatctgcataccaaatccccatgacataatttcagctgtataacaaacccacatgtgtacatcgaaccaaaaataaaagctaaaagaaaaaaaactccccgagtgggagagagtgcaatgtaggtgaaagaacttatttttgctacagataatggcccaggtagggctgtactctgatttacttctgtgtgaatacaggcagatgagattatgaacaagtggtccagaccctaggatggtggagaaaacaggttgctgctgcagattcagtgtctgggggtggggttatgccaggagacttgtagatactgtgggtccttttcaagaaacactgggttcaaaaatgccgtggtgaagttcctgagggtggtgccgagtcctaggaggagtgtggacatgtcaatgtctagtgtgtgtgtttgtgagtgggtgggaatactatggtggcacctgtgggaaaagggcgtctgtcatgggagtttctctccgctaagttttcagtccacagttgccctcggagaagacctggaatcacaggacaatgggcagtgtgacagcctgtgtacaggagagcagagcctcccattcccagacacccagagttttattccaggccaggcctccatgatatctttttttctggcaccaaatctgtagcatttgctgaacatcaaacaattctccaacaccaacttacggtctaacatttgaattctgacaccacccacagtcagtacagaccctgattcagggctcggtcccacaacattgtcctcaatgcagatgccagtcataaaccccatgggcccatgtatgtgtctgagctactgtttaaaaacgggagacggccgggcgcggtggctcacgcctgtaatcccagcactttgggaggccgagacgggcggatcacgaggtcaggagatcgagaccatcctggctaacacggtgaaaccccgtctctactaaaaatacaaaaattagccgggcatggtggcgcgcgcctgtagtcccagctacacgggaggctgaggcaggagaatggcgtgaacccgggaggcggagcttgcagtgagtcgagatcgcgccactgcactccagcctgggcgacagagcgaaactccgtctcaaaaaaaaaaaaaataaaaataaaaaaaaataaaaataaaaacgggagactcccataacgtccctgaagttcaataatttcatagagctactcacagaactcagcaggaaactgtagttacctttaccggtttaatatataagatgaaggccaggaaaagtcaaatggaaaaaatgcacagaacaaataaaagagatggaaaaagatgaaacacataatcctaaaaaatatttgtgattaataaaatcatcctaggtcgggcgcggtggctcacgcttgtaatcccagcactttggggggccgaggcgggcggatcacaaggtcaggagattgagaccatcctggctaacacggtgaaaccctgtctctactaaaaatacaaaaaattagcggggcatggtggcaagcgcctgtagtcccagctactcaagaggctgaggcaggagaatggcttgaacccaggaggcggagcttgcagtgagccgagatggtgccactgcactccagcctgggcgacagagcgagactctgtctcaaaaaaataaataaataaataaataaataatttaaaatgtctccatcctttgtgtgctccaggaacagtttatggaaggaaacacccttcccattatgacttaagtggtgctctcttttctttcctaaaacacaggctgacacacacactgcacattttctccttttttttttttgagatggagtctctctctgtcgctgaggctggagtgcagtggcgcgatctcggttttctgcaagcgctgcctcccaggttcacgccgttctcctgcctcagcctccggagtagctgggactacaggcgcccaacaccacacccagctaacttttttttttttttgtatttttagtgaagacggggtttcaccctgttagccaggatggtctcgatctcctgacctcgtgatccgcccgcctcggcctcccaaagtgcggggattacaggcgtgagccaccgcgccgagcctggaattcatttttttttttaaacataaatctaatgtttttattttacaaagtttagaaattgcctcaaaacaataaaaacttcatcatcagtaagacctccccagtttcctttcatcttaaccttaactgcatctgcctgtgggatcccagctttccagggctctgtagcttctctcaggataaaggcttcttctatggctggggtgagcaggctgagacagctgcatgggtggctcctcagaaagaactaactgggcctttaataacttcctcttgcatgcttaatattagccctagcttggagttactaggttcaagctttaatttccatgtcagagttattcacttggttttcaaaactaagtgtttgaaaaatccagtgaaattactcacagcgtttacataagaaaaggaaattttaaggtgcttacttttttttttttttttttgagatggaatctcgctctgtcacccacactggaatgcaatggctggatctcagctcactgcaacctccacctcctgggtaaaagctattcttctgcctcaccctcccaagtaggtgggactacaggcatgctccaccacacccagctaatttttgtatttttagtagagacagggtttcaccatgttgggcaggcgggtctcaaactcctgacctcaaggaatcaacccgcattggcctcccaatgtgctggaattacaggcgtgagctactgcacctggctaaggtgcttgcattttatgcctccataagaaaaacaaatatatctacttctttcagacaatatatgtattattttattatttatattaaaaaataatgtagtaaaaaattagtcatatgggaatgcttctaaaagttaccacgtttcatcacatgcaatttagcactaaactcagaaatcaagacaacaggatatagaatggagatattcactgtcacaaatttaccctgcaaaaagaggaactgatgttttgatgaatctgtgtaactcattcaccacattttcctatgaaaatatattcattgtctagagccaaaatggaagagagattttccctattttttcccttggtagctagcattataaagctaaggcttagaattctgtctgaaatcactaagacataaaaaccacacccaagaaaattcctaaactcactcttggaaagaaaaatgtaaatgagttattaacaaatggaatatatgattaaatattaattttttgaaactcatcttttattttctttgtaaatattttcttacctttcaagccctactaataaaatgcaaattacagataaaaaactgattcaggtgggtgctgtggctcactttaatgccagcactttgggaggccaaggcaggcagatcaattaagattaaaagtttgagtggggcacggtggctcatgcctgtaatcctagcactttgggaggcctaggtgggcggatcacctgaggttgggagttcgaggccagcctgaccaacatggagaaaccccatatctactgaaaatataaaaattagctgggcatggtggcacatgcccaaggctgaggcaggagaatctgggaggctgaacctgggaggcagaggttgtggtgagccaagatcacgtcatcgcactccagcctgggcaacaagagcaaaaatccatctcaaaaaaaaaaaaaaaatgactaaaagtttgggaccagcctggtccatctctactaaaaatacaaaaactagccaaatacagtggtgcacacgtgtagtcctagctactccggaggctgaggcatgagaatcacttgaacccagaaggtagaggttgcagtgtgccaagatcaagtcactgcattccaacctgtgcaacagagtcagactgtcttaaaaaaaaaaaaaaaaaggcagaatcaacaacaacaacaaaaacacctgaggtcaaaataagtgaacaaatctttcaaggtagatatccaatcactcaccccatcctgttcacatgctcaataaccaccctcccaggagacacagcgcagacacagcgtgactgccccagctgcattttactatgtaagtttttaccccatctcactggggtcattttcttttgtcttttgaaggtttttttcacaaactttttactatttttctttcactccccccaagagcatccagggggcagaaattatttgttttcccctcaataccagcatctgattggctcaccaacaatgtgtctccaagaaatggaagttaggttgggtcaagacaatcttcatgtctcaaggggctagcttttcaaaaaaaaaaaaaaaagtatatcaggagatgcctttcagccccaaggctgccacctgctcccttgagaggctacactctatacttcaggtggtcctaagggagaaagtgacccaagagctaatatccattagacattttagcagacatagccatagtgggtatcttggtttatctccagaaagtactaaaacccaggcccagaataaaactgaaggttagcagaggtcacatcaccctataatgtttccagagggtaatgttaacctaaaaacattctggtaagttctctggaaaaataaaagaaaaaaaggtacagatattttttacaatacagtgtcaggggattattctttgctttcttctcatgggaaatatttaaaaatagaaaacaaatcttttcaatagtgctatgcaatgctttaaacaatgattgaggaacgtggggtacaggaggccctgctggggacacatgtgaaaaatgccagagaaaatcagccccttgtgggttgtgaaaataattaagcggcaggcaattagactgagaaggctctagtcctcagattcctacttgtaaaaaaatgtaaactcaagttgatttgttaataaattactacatttggggaaacaaatttcaggcttaaacaactataaactgccaaataagctctgattacataaccaggaaatttccaccttgattatacaaattaagaagctacgtaagtacacctaaccaattgttgaatttggttttcttcatcactgattttacaaatgtctttccttcaagcccctcccatggaccacagactacaaactataactgggtgctctacaattcttgaatcactctttgattaaattacttgattttttgcagtgactcccataattttttttttttttgtaaaggacatatcatatttattcatacacatgctggaattattggtgcagacatttaaatacattttctttgagaaagtccttttttttttttttttggatggagtttccctcttgttgcccaggctggagtgcaatggtgcaatctcagctcacaacaacctctgcctcctgggttcaagcaattctcctgcctcagcctcccaagtagctgggattacaggcatgcaccaccacgcccagctaattttttttatttttagtagagacggggtttctccgtgttggtcaggctggtcttgaactcctgatctcaggtgatctgcccgccttggcctgccacagtgctgggattacagtcgtgagccaccacagctggcctgggaaactccattctttttttttttttttttttttaaatttatttttttattgataattcttgggtgtttctcacagagggggatttggcagggtcatgggacaatagtggagggaaggtcagcagataaacaagtgaacaaaggtctctggttttcctaggcagaggaccctgcggccttccgcagtgtttgtgtccctgggtacttgagattagggagtggtgatgactcttaacgagcatgctgccttcaagcatctgtttaacaaagcacatcttgcaccgcccttaatccatttaaccctgagtggacacagcacatgtttcagagagcacagggttgggggtaaggtcacagatcaacaggatcccaaggcagaggaatttttcttagtgcagaacaaaattaaaagtctcccatgtctacttctttctacacagacacggcaaccatccgatttctcaatcttttccccacctttcccgcctttctattccacaaagccgccattgtcatcctggcccgttctcaatgagctgttgggtacacctcccagacggggtggtggccgggcagaggggctcctcacttcccagtaggggcggccgggcagaggcgcccctcacctcccggacggggcggctggccgggcaggggggctgaccccccccacctccctcccggacggggcggctggccgggcggggggctgaccccccaacctccctcccggacggggcggctggccgggcggggggctgacccccccacctccctcccggacgggcggctggccgggcagaggcgcccctcacctcccggacggggcggctggccgggcggggggccgacccccccacctccctcccggacggggcggctggccgggcagaggggctcctcacttcccagtaggggcggccgggcagaggcgcccctcacctcccagacggggcggctggccgggcggagggctgatccccccacctccctcccggacagggcggctggccgggcggggggctgacccccccacctccctcccggacggggcggctggccgggcagaggggctcctcacttcccagtaggggcggctgggcagaggcgcccctcacctcccagacgggacggctggccgggcggagggctgacccccccacctccctcccggacggggcggctggccaggcggggggctgacccccctacctccctaccggacggggcggctggccgggtgggggggctgacccccccacctccctcccggatggcacggctggccaggcggggggctgacccccccacctccctcccggatggcacggctggccgggcgtgggggctgaccccccacctccctcccggatggggcggctggccgggcggggggctgacccccccccccccacctccttcccggacggggtggctgccgggcggagacgctcctcacttcccagatggggtggctgccgggcggagaggctcctcacttctcagacggggcagctgccgggcggaggggctcctcacttctcagacggggtggttgccaggcagagggtctcctcacttctcagacggggcggccgggcagagacgctcctcacctcccagacggggtctcggccgggcagaggcgctcctcacatcccagatggggcggcggggcagaggcgctccccacatctcagacgatgggcggccgggcagagacgctcctcacttcctagatgtgatggcggctgggaagaggcgctcctcacttcctagatgggatggcggccgggcgtagacgctcctcactttccagactgggcagccaggcagaggggctcctcacatcccagacgatgggcggccaggcagagacactcctcacttcccagacggggtggcagccgggcagaggctgcaatctcggcactttgggaggccaaggcaggcagctgctccttgccctcgggccccgcggggcccgtccgctcctccagccgctgcctcccgggcggcgctcgccggcgccgactcccataatttactttttctagacagagtctttctctgtcgcccaggctggagggaagtggcatgacctcagctcactgaaacctactccttccgggttcaagcgattctcacctctgcctttggagtagctgggactacagacattcaccatcacacccagccaatttatgtatttttagtagagatggggtttccccattttggccaggcttatcttgaactcctgacctcaagtgatccacccgcctcggcctcccaaagtgctgggattacagacgtgagccaccgcgccaggccccataaattttttcttttccttctttcttttttttttgagacagagtctcgctctgttgccaggctggaatgcagtagcacgatcttgtcttactgcaacttccgcctcccaggttcaagcgaattctcctgcctcagcctcctaggtagctgggactacaggcccccgccgctatgtttggctaatttttgtgttttagtagagacagggtttcaccatgttggccaggatggtctcgatctcttgactttgtgatccacccgcctcggcctcccaaagtgctaggattacaggcatgagccaccacacctggccacccgtccccataaatttttaataagagaaaacagaaactgtgaaccccacagaccaaagctcttcccattcatgaacccacaccccgagtcagggttcccccccaaagatcctcctggagtccccgcacaatctaggagagacgtggcactgtgggtgcagggctgccctgagaaggtttcaggccagggcacagtcaccgcgcagggaagagacaggacacccctggaccgcctgtcagcgcagctgccatcttagggctgaaggggactgaggccgagctgggcaaggagaacttgtggcacagattgtggagctgactgaggagaggcctgagtcctgccactgccacttgtcaccggttccaaccatcccctcccgctcactcaggatgtcggaccggcactctcactgtttctaggcttccaggaggtcctggtgtcttagctgtggatctcccaatacctgcaggtcacagggctatagaggttgcgcctctaggagcagaggacacagactagtgaagaggagacccagagctcaggctgcagccagagacaaaggctgcagccaaacactgaagacgtcctgttcactccagctgcgtgcctgattgggcagttttcaggccagcgtttcttttttcttttttttttttattgatcattcttgggtgtttctcgcaaagggggatttggcagggtcataggacaatagtggagggaaggtcagcagataaacaagtgaacaaaggtctctggttttcctaggcagaggaccctgcggccttccgcagtgtttgtgtccctgggtacttgagattagggagtggtgatgactcttaacgagcatgctgccttcaagcatctgtttaacaaagcacatcttgcaccgcccttaatccatttaaccctgagtggacacagcacatgtttcagagagcacagggttgggggtaaggtcataggtcaacaggatcccaaggcagaagaatttttcttagtacagaacaaaatgaagtctcccatgtctacctctttctacacagacacagcaaccatccgatttctcaatcttttccccacctttcccccttttctattccacaaaactgccattgtcatcatggcccgttctcaatgagctgttgggtacacctcccagacggggtggtggccgggcagaggggctcctcacttcccagtaggggcggccgggcagaggcaccccccacctcccggacggggcggctggctgggcggggggctgacccccccacctccctcccggacggggcgtcagcccagcgtttctgattggataatgcttaaggcccccgccccctcaggccctgagtaacagaaaatgtgatcaggactgagtgaagaaaaagtcacagcctaagctgcagcgtttttcaggcagggcttcctccctgagctgagccaggcccaacccagatcatgggaaaattctatctttttttttactctctctctttttgaatatattcaaaaggtgaacagaagtattttgctgtcatattaataatacataaaatttttttcaagagaaaatcagcttttactttggtaatagtgtattatcaatactaaagctaattttaataaaccttataaataaatcaaatttgtcatttttgaccactccggttttacatgtatattttgtaatctcttgtaatttttaaaaactgtttacattttatttttatccaaattctttttattttttcaatttgaaaccacctttaagtaatttcaaattgttataggagatagaaagaagtcatttagggccaggttcactggcaagtgcctgtaatcgcaacactttgggaggccaaggtgggtggatcacttgaggtcaggagttcaagaccagcctggccaacatggtgaaaccccatttctactaaaagtacaaataactagctgggtgtggtgctgcacacctgtagacccagctagtccggaggctgaggcaggagaattgcttaaacccagaaggcggaggttgtgtaactgcccaaggggttcaccttgccctatgtctagacagagctgattcatcaagactgggtaatttgtggaggaaaagttaaatactaaatttgaacttaattgaacgtggacaaactcagtagtcaccaagttctcaaacaggttgtgtgaggcccttgaggcattcattcagcgctgtttcagagaaatctctatttcaatctatttctatatattagttgttgaaaaacaatagacaatcgcaaaaacaagttgacagttttgtgttccttgaccccagttgcaaatggccctcatgactgggccttatgccaaacaactcgttacaaaagagctagggtatcagattgtgctgaagcttcattagaccctcctcatctgtgcaggaatgagtagctgactctggagcccaagctgttgcttcccagtctggtggtgaatcctccatagtctggtgagtgtaaatatatatatctcttttcctttctcctcttcccattgcaatttgcttattatatcaacatgcttattatatcaatctggttattacattgatttgcttattatataatttgctaattatatctgcatttccatttacgtggcacaaagcttatttacccttaaaggtattgtgtgtgtgtcttttcttctccccttgaatgtttcccacacagaatatttttggcgtcacgaacaggattcaaaaaccaaactgtgccactttttggccacaaggacagggctggaaactcgaggaaatcccaaatccagggatgggaactccccaatatcactgtcaattcctacaggattgaacgaaggggacgaatgcagaaatgaagacaaagacaaaagatttgttttaaaagaaggggtcaggcagggcgcagtggctcaggcctgtaatcccagcactttgagaggccgaggtgggtggatcgcgaggtcaggagagcgaaaccatcttggctaacacggtgaaaccccgtctctactaaaaatacaaaaaaatttagccaggtgtggtggcagacacctgtagtcccagctacctgggggggtgggggggtggggctgaggcaggagaatggcatgaacccaggaggcagagcttgcagtaagccaagatcgtgccactgcactccagcctgggtgacagagcgagattcggtctcagaaaaaaaaaaaaaaagaaggtatcaggggctccttgcttctagtgagcagaaggcagccctgtttctacaggccttagtatttattaggtagaatcaatagggagggagaggtaatggttggtcagctgcttgatttatcacaggtacatataattgctttctttgtacaacaggcttcagatattcctatagataaccacaaggaacactgcgcctggggcataactgccctcagcacccgttctggcagcagatgcagtttgtcagttttccaacatcctgctttcatgagaagagttttcccatatagcctctgtcaggcctctgagcccaagccaaatgaaatttggtgccatgactcggctcgggggacctcccttgggagatcaatcccctgtcctcctgttctttgctccgtgagaatgacccacctgtgacctcaggtcctcagaccgaccagcccaagaaacatctcaccaatttcaaatccggtaagcggcctctttttactctcttctccaacctccctcactatccctcaacctctttctcctttcaatcttggcgccacacttcaatctctcccttctcttaatttcaattcctttcattttctggtagagacaaaggagacacgttttatccatggacccaactccggcaccggtcatggactgggaaggcagccttcccttggtgtttaatcattgcagggacacctctctgattatacactcacgtttcaagggtgtcagaccacacagggacacctgccttggtccttcacccttagcggcaagtcccgattttctgaggaagggacaagtacccctcaaccccttctctccttgtctctaccccttctctgcttttctggggcaggggcaagaacccctcaaccctttctccttcacccttagcggcaagtcccgctttcctggggcaggggcaagtacccctcaaccccttctccttcacccttagtggcaagtcctgctttcctagggggcaagaaccccccaatcgcttatttccataccctaacctcttatctctgtgccccaatcccttatttctgcaccctgacctcttatctctgtgccccaatcccttatttctgtgccccaacaccttctctgcttttctggagggcaagaaccctccaccccttctccgtgtctctactcttttctctgggcttgcctccttcactatgggtaagcttccaccttccattcctccttcttctcccttagcctgtgttctcaaaaacttaaaatctcttcaactcacacctgacctaaaacctaaatgccttttcttctgcaatgccacttgaccccaatacaaactcgacagtagttccaaatagccagaaaatggcactttgaattttttcatcctgcaaaatctaaataattcttgtcgtaaaataggcaaatggtctgaggtgcctgatgtccaggcattcttttacacatcaatcccttcctagtctctgtgcccagtgcaactcgtcccaaatcttccttctttctctcccacctatcccctcagtaccaaccccaagcatcactgattctttctaatcttccttttctacagacccatctgacctctctcttcctccccaggctgctcctcaccaggccgagctaggtcccaattcttcctcagcctccgctcctccaccctataatctttttatcacctcccctgtaggggtgggttgcccctccacacctgtgggtgtttctcataaggtggaacaagagacttaggaaagaaaaagacacaaagtatagagaaagaaataaggggacccggggaaccagcgttcagcatatggaggatccccccagcctctgagttcccttagtatttattcatcattcgtgggtgtttctccaagagggggatgtgtcagggtcacaagacaattgtggggagagggtcagccgacaaacacgtgaacaaaggtctttgcatcatagacaaggtaaaggattaagtgctgtgcttttagatatgcatacacataaacatctcaatgctttacaaagcagtattgctgcccgcatgtcccacctccagccctaaggtggtttttccctatctcagtagatggaacatacaatcgggttttataccgagacattccattgcccagggacgggcaggagacagatgccttcctcttgtctcaactgcaagaggcatgccttcctcttatactaatcctcctcagcacagaccctttacgggtgtcggggtgtcgggcggggggacagtcaggtctttcccttcccatgaggccatatttcagactatcacatggggagaaaccttggacaatacctggctttcctaggcagaggtccctgcggccttccgcagtgtttgtgtccctgggtacttgagattagggagtggtgatgactcttaacgagcatgctgccttcaagcatctgtttaacaaagcacatcttgcactgcccttaatccatttaaccctgagtttgacacagcacatgtttcagagagcacggggttgggggtaaggtcacagaatctcaaggcagaagaatttttcttagtacataacaaaatggagtctcccatgtctatttctttctacacagacacagtgacaatctgatctctcttgcttttccccacatcccctcctcacacctggtccggcttacagtttcgttctgtcccccacctgcccagcaatttactcttaaaaaggtggctggagccaaaggcatagtcaaggttaatgctcctttttctttatcccaaatcggatagcgtttaggctctttttcatcaaatataaaaacccagcccagttcatgacttgtttggcagcaaccctgagacactttacagccctagaccctaaaaagtcaaaaggccgtcttattctcaaaatattttattacccaatctgctcccgacattaaataaaactccaaaaattaaattccggccctcaaaccccacaacaggatttaattaacctcgccttgaaggtgtacaataatagaaaaaaattgcaattccttgcctccactgtgagacaaaccccagccacatctccagcacacaagaacttccaaacacctgaaccacagtggccaggcgttcctccagaacctcctcccacaggagcttgctacacgtgccggaaatctggccactgggccaaggaatgcccgctgcccaggattcctcctaagctgcgtcccatctgtgtgggaccccactgaaaatcggactgttcgactcacctggcagccactcccagagcccctggaactctggcccaaggctctctgactgactccttcccagatcttctcagcttagcggctgaagactgacactgcccgaacgcctcggaagccccctagaccatcacggatgctgagcttccggtaactttcacagtggaaggtaaacccatccccttcttaatcaatacagaggctacccactccacattaccttcttttcaagggcctgtttcccttgcctccataactgttgcgggtattgatggccaggcttctaaacctcttaaaactccccaactctggtgccaacttagacaatactcttttaagtactcctttttagttatccccacctgcccagttcccttattaggctgagacactttaactaaattatctgcttccctgcctattcctggactacaactatatctcattgctgcccttcttcccaatccaaagcctcctttgcatcctcctcttgtatccccccaccttaactcacaaatataagatacctctactccctccttggtgaccgatcatgtaccccttaccatctcattaaaacctaatcacccttaccccactcaatgacaatatcccatcccgcagcaggctttaaaaagattaaagcctgttatcactcgcctgctacagcatggccttttaaagcctataaactcttcttacaattcccccattttacctgtcctaaaaccagataagacttacaatttagttcaggatctgcgccttatcaaccaaattgttttgcctatccaccccgtggtgccaaacccatatactctcctatcctcaatacctgcctctacaacccattattctgttctagatctcaaacatgctttctttactattcctttgcacccttaatcccagcctctcttcgctttcacttggactgaccctgacacccatcaagctcagcaaattacctaggctgtactgccgcaaagcttcacagacagcccccattacttcaatcaagcccaaatttcttcctcatctgttacctatctcggcatttctcataaaaacccacatgctctccctgccaatcgtgtccaactgatctctcaaacccaagcaccttctacaaaacaacaactactttccttcctaggtatggttagcatggtcagaattcttacacaagagccaggaccacaacttgtagcctttctgtccaaacaacttgaccttactgttttagcctagccctcatgtctgcgtgcagcagctgctgctgctttaatacttttagaggccctcaaaatcacaaactgtgctcaactctctctctacagttctcataacttccaaaatctattttcttcctcatacctgatgtatatactttctgcttcccggctccttcagctttactcactctttgttgcatctcccacaattaccattgttcctggcccagacttcaatccagcctcccacattattcctggtaccacacctgacccccatgactgtatctctctgatccacctgacattcacatttccccaaacttccttctttcctgttcctcaccctgatcacacttgatttattgatggcggttacaccaggcctaatcgccacacaccagcaaaggcaggtgatgctatagtacaagccactagcttgcctcttagaacctctcatttccttcccattgtggaaatctatcctcaaggaaataacttctcagtgttccatctgctattctactactcctcagggattattcaggccccctcccttccctacacatcaagctcgaggatttgccccacccaggactggcaaattagctttactcaacatgacctgagtcaggtaactaaaacacctcttagtctaggtagacactttcactggataggtacaggcctttcctacagggtctgagaaggccaccacagtcatttcttccattctgttagatataattcctcagtttagccttcccgcctctatacagtctgataacagatgagcctttattagtcaaatcagccaagcagtttttcaggctcttagtattcagtgaaacctttatatcccttatggtcctccatcttcaagaaaagtagaatggactaaaggtcttttaaaaacacacctcaccaagctcagccaccaacttaaaaaggactggacaatacttttaccactttcccttctcagaattcaggcctgtcctcagaatgctacagggtacagcccatttaagctcctgtatagacgctcctttttattaggccccagtctcattccagacaccagaccaacttagactgtgcccccgaaaaacttgtcatccctactatcttctgtctagtcatactcctattcacctttctcaactactcatacatgccctgctcttgtttacactgccagtttacactgtttttccaagccatcacagctgatatctcctggtgctatccccaaactgccactcttaactcttgaagtaaataaataatctttgctggcaggactatgctgaatctccttaggcattctctaatcagatatcctgagtcatcccaattcttagaccttttatacctgtttttctccttctgttattccatttagtttctcaattcatccaaaaccatatccaggccatcaccaatcattctatacgacaaatgtttcttctaacaaccccacaatatcaccccttaccacaagacctcccttcagcttaatctctcccactctaggttcccacgccgccccaatcccgcttgaagcagccctgagaaacatcgcccattctctctccatatcaccccccaaaaattttcaccgccccaacacttcaacaccattttgttttatttttcttattaatataagaaggcaggaatgtcaggcctctgagcccaagccaagccatcgcatcccctgtgacttgcatgtatatgcccagatggcctgaagtaactgaaaaatcacaaaagaagtgaatatgccctgccccaccttaactgatgacattccaccacaaaagaagtgtaaatggcctgtccttgctttaagtgatgacattaccttgtgaaagtcattttcctggctcatcctggctcaaaaagcacccccactgagcaccttgcgacccccactcttgcccgccagagaacaaaccccctttgactggaattttcctttatctacccaaatcctataaaacggccccacccttatctcccttcactgactctcttttcagactcagcccacctgcacccaggtgaaataaacagccatgttgctcacacaaagcctgtttggtggtctcttcacacggatgtgcatgaaagcctccagtggtatactgagttggtcaggacccccattttctctgcgtccaacatccccagttctcctctttggtgattgagtggttcagggaaactggcctttgtaagaactgagaatctaaattaatgcaatttaaacctttgactgtgtatgtgagaggagagaaagaccctctcacattgttttatattgttttatattcagtaaaaacaacaaggaagtaaaaccaaagacaggcagcctggcgccaggcctgaaaccaggcctgggcccacctggcctaaacccagtagttaaaaatcaacttatgatttagaagctgatgttattcatagattccttacattgtatagaagaacacggtgaaactccctgccctgttctgttcctccctgaccaccggtgcatgcagcccctgtcatgtaccccttgcttgctcacatcaatcacgaccctttcatgtgaaatctttagtgttgtgagcccttaaaagggcagaaattgtgcactcagggagctcagattttgagacagtagctggccgatgctcccagctgaataaagcccttccttctacaactcggtgtctgagagattttgtctgcggctcatcctgctacatgtgaagtgcagcaggggattccagtcagcaaaggagatgctgaaggatctccccgagtgaatggtgtttgcttactctttataagttaatgtatcaggataggggatagttgctacaagagaaataagagctggaaaagaaaaatgccaatccaactgccagactgaccctggcccaatgccaggcctatgtcttaactgttcagactcaaagatatcagcctattgatgaaaaaagtggctgtcccaatggccccatcagggtaaaattgaagaactagtcagtcaggtcttggagcaggtaaaaacacagctcctatctcaaggatgggaaattaaccttagtaaaattcaaggacaaattgtaaaattccttggcatcctgcacaaactataaaattccttggcatcctatgaaatgcagggaaatagtccattttaccaaagactaaggctaaaatactaaaaattgcaacccttaccactaaaaaggaggactagaaatttattggcttgtttggattcgggagacattatattcaccacttgggtaacattttacaacctctgcatgcagtcactagaaaatgctgtgactttcactggggagagaaagagagcatggcttttgaacaagctaaacaagcagtgcaactggccctggacctatggcccatatgagatgggccagtagaactgcaaataactgtcctaaatcaacatgctaattggagccttaggcagaaacaagatgggaagagggtacactttgggttttgaacccagaaattgccagaggccagcaaagcttatacccctttcaagaagcaattgttaccttgctattgggctttgctggaaatggaacacctctgcttcaaccgtgatgtctttataaggtctgaaattcctattatgacttgagtcatgagttcccccaaaactcaccaaatagggcatgcccaagaaagtaacatcataaaatggaaatacaacatagaagaccaggctaagccaaaaccaaagggggtatcatttttacatgaggatgtacaaaacttgccagctcaggaaaccactgaggaagtgctgcacatagggaaggaaaccgcccctccccccactcaatggtgcagttcctttaaagaactaagcccagaggatcagaaacatgcttggtttactgatcgatccagcaaacatattggtgggacccaatgctggaagggcatggcttataatcctgttaaaaacgtaagcatttctgatgaaggaaggggtgggagcagccagttagctgaactagtagccaacctccaagatattcaggaggaagccagagggatttgtcacttgtataccaactcttggtcagtagcaaatggtcttactacctggatgctccaatagtgacaaaacaaatggttaattgggaataaagaggtttggggaaaaaaatactgagaagatatctgaatcctggtgcacactaccattgttgctgttttccatgttgatgctcatccatctctgctttctcttgacagactatttaatcaccaggaagatcaacaggccaaaatttttattataactgcaaacttgaatgcggatgaattgatttcctgttcaagccttgcaatgactggcattataatgtgtggtggtataattgatagtgattagtggcctaaatattccacttaaaagatacagaatggtagaatggagaagagtttaccaaccaaatatctgcggtctttaagagactcacccaacacataaaaactcacataaagttaaggtaaagggttgggaaaagatagtcatgcaaatgtaccccaaaagcaagcagtagtagccattcttacatcagacaaaacagacattaaagcaaaaacagttaaaaataaaaaaagacaaagagggacattatataatgataaaaggactagtccaacaggaaaatatcacaattctaaatatatatgcacctaacactggagctcccagtttattaaacaattactactagacctaagaaatgagataaatggcaacacaataataatggggaacttcaatactctactgacagcactagacaagtcatcatgacagaaagtcaacaacaacaacaacaacaaaaacaatggacttaaactataccgtagaacaaatggacttgacaaatatttacagaacattccacacaacaactgcagaatatacatttcattcatcagcatatgaatcattccctaagacagacatatgatgggccacaaaacaagtctcgataaatttaagacaatcaaaattatatcaactactctgtcagactacagtggaataaaagtgaaaactccaagtgaaccctcaaaaccatgcaaatccatggaaattaaataaatacatggaaattaaataaaaataaaatttaggatcaacttgtttctgaatgattgttgtatgaaatcaagatggaaatttaaaaattctttgagctgaacgataataatgacaatctattaaaatgtctgggatacagcaaaagtcgtgctaaaaggaaagttcatagcatcaagtgcctactaaaaagtctgaaagctcataagtagacaatctaagataacacctcaaggaactagagaaacaagaacaagccaaacccaaacccagtagaaaaaaagaaataacaaagatcagagcagaaccctagggggaggggtggctgcagtctctgtggaccagcagacttagcctttcctcctgctagttttgaagaatttgagcagcccagatgagtggattttcccccagtgaaacacccccctccaccaaaggacagtcaaagtgcttcattaaatgagttctgcttcctgtgccacccaactggatgagacccttcaacagggattgtcagacaccctatagaggagcaattctactggcatcaggtttgtgcctcttgaggtcagagatcccagaggaaggagcgggcactcttctttgctgttctccaacttccttgagtgacatctccaggcacggcggtgaaccagatgaataggtcctgaagttagcccctagcaaactgcagcagcgctacagaagatggacctgaccattgaaagaaaaacaaacagaaagcaacaatgcatcaacaagaaaaaaatgtacccacaaaaacctcatccaaagccacacatggtggctcacacctgtaacccaatactttgggaggccgaggcagtgggcagagcacttgaggtcacgagttcgagactagcctggccaacatggtgaaaccttgtctctactaaaaaatacaaaaaaaaatagccaggcgtggtggtgcatgcctgtagtcccagctactaggtagtctgagacatgagaatcacttgaacctgggaggcagaatttgcagtgagctgcgattgtgccactgcactccagcctgagtgacagagagagagactgttaaaaaaaaaaaatccaagtgtcagaagcctcaaagatcgaaactagacaaactcatgaagatgagaaagaatcaacaaaaaacagctgaaaggccagagtgcctcttctcttccaaatgatcaaaatgtctcttcagcaaggtgcagaactggacagaagatgagatgcatgaattgatagaagtaggcttcagaagatggttaataacaaactctgctgagctaaagaaacatgttcaaacccaatttgaagaagctaagaacctcgataaaaggttagaggaactgttaactagaataaccagtttggagaggaacataagaggatgagatgcatgaattcacagaagtaggcttcagaagacggttaataacaaactctgctgagctaaagaaacatgtttgaacccaatttgaagaagctaagaaccttgataaaaggttagaggaactgctaactagaataaccagtttggagaggaacataagaggatgagatgcatgaattcacagaagtaggcctcagaagatggttaataacaaactctgctgagctaaagaaacatgttcgaacccaatttgaagaagctaagaaccttgataaaaggttagaggaactgctaactagaataaacagtttggagaggaacataaatgacctgatggagctgaaatgtttggcatgaggcccagtcactagggccctttgcgactgggctcaaggaacacaaaaacgttatcttgtttttcaataactaacatataggaatagattgaaacagagatttctctgaaatgacactacatgaatgcctcaatgaatgcctcaagggggtcacacaaccggttctgagacttggtgaccattgtttgtgtctgtgttcaatttatttcaaaattaatatttaacttttcctccacaaattcccctgtcttgatgaatgggctctgtctaggcaaaaggcctgtctttatgaatcagctctgtctagacaaaaggcaaggtaaaacccttgggctgttacacaacctccgcctcctgggttcaagcgattctcttgcctcagcctccggagtagctgggactacaagtgcacaccagcacacccagataattttttgtatttttagtagaaatggggtttcaccatgttggccaggctggtcttgaactcctgactcaagttatccgcccaccttggcctcccaaagtgctggaattagaggcgtgagccactgcgcctggttctaaatgatttctatttcctgtaacaatttgaaattacttaaaggttgtttcaaattgaaaaaaagaatgtagataaaatataaaaagttaaaaaaattacaagtgattatgaaatatatgtgtaaatctcgagaggtcaaaagtgacaaatctgatttatatataaggttttattaaaattagctttagtattgataatacactattaccaaagtaaaagttgattttctaacaaaaattttatgtattattaatatgacagcaaaatacttctgttcaccttttgaatacatgcaaaaagagagagagtaaaaaagagatagaattttcccttgctctagggtgggcctggctcagctcagggaggaagccctgcctgaaaaggctgcagcttaggctgttactctttcatcactcagcccagcatctgatcacatcctctgtcactcagggactgagtgggcggggccttaagcattatccaatcagagacgctgggctggaaaccgtccaatcaggcaggcagctggagcaaagaggacggcttccgggtttggcgcggcctttgtctctcgctgcatctggagctctaggtcgcctcttcgctactctgtgtcctctgctcctagaggcccaccctctgtggccctgtgtcctgtaggtattgggagatccacagccaagatgccgggaccccttagaagcctagaaatggtgagagtgcccattggacatcctgagagaggggagggactggttgatgggaagtggctgtggagggactcaggcctccccgtagtcagctccacaatctgcgtccggacttctccttacccagctcggcctcagtccccttcagccataagatggtggctgcgctgacagccggtcccggggcgtcctgtctcttccctgcgcagtgaccgtgccctggcctggcgccctctctgtgcagcagctctccacccgcagcttcgggtctctcccagatggtgcgggaaccacgagaaggtcatcaggggagaatcttgactcggggtgcgggttcacgattcggaagagctttggtccgtggggttcacagtttctcttttcttttgttaaaaatttatggggccgggcgcggtggttgacgtctgtaatcccagcattttgggaggcgaaggctggcggatcacttgaggtaaagggttgctaggacaactaaattcctcttcaaagactcaacttcctgatcagaagttgtaaaagttgtaaaacaaccctacccctttttctcccttttccttttctcgcaaatcgctcgtttatcctatttggaaaaagtttgggtctaagccaaccgggatcagcttagattgtgcggtctgaccccagccaataggggaaggacacaaaaacaaaaactacgttggggttaaaaacccattcctggtcgggcgcggtggctcacgcctgtaatcccagcattttgagagacctaggcgggaggatcttgtggtcaggagttctagaccatcctggccaacaccgtgaaccccgtctctactaaaaatacaaaaattagccaggtgtggtggcaggcacctgtaatcccagctacttgggaggctgaggcacgagaattggttgaacccaggaggcggaggttgcagtgagctgagaccgcgccatcgtacttaagtgtgcgtgacagagcaagactccttcacacacacaaaagaagggccaggcgcagtggctcacgcctgtaatcccagcactttgggaggccaaggcaggcggatcacctgagttcgggagttcgagaccggcctgactaacatggagaaaccctgtctctattaaaaatacaaaattagctgggcttggtggcgcatgcctgtaatcccagctactcgggaggctgaggcaggagagttgcttgaacccgggaggaggaggttgcggtgagccgagatcgtgccattgcactccagcctgggcaacaacagcgaaactccgtctcaaaaaaaaaaaaaagtaagaatcttaaaattttcttcctttatgtaaacactgtttgagtaatttcactggatttttcaaacacttagtttcaaaaaccaagtgaataacactgacatggaaattaaagcttgaacctagtaattccaagctaaggctaatatgaagtctgcaaaaggagggggttaaaaaaaattttttttttttgagacagtcttgctttgtggcccaggctggagtgcagtggcgcgatctcggctcactgcaacctccgcctccggggttcaagcagttctcctgcctcagcctcccaagtagctgggactacaggcactcgccaccacgcccggctaatttttgtatttttagcagagacggggtttcaccatattggccaggctggtgtcgaactcctgaccttgtgatccgcctacctcagcctcccgaagtggtggggttactacattttttttattttgacatggagtttagctcttattacccagtctggagtgcaatggtatgatctcggctcaccgcatcctctacctcctgggttcaagggattttcctacctcagcctctggagttactgggattgcaggcacgcgccgtcacgcccggctaattatgtgtgtttactaggggtttctccatgttggtcaggctggtctctaactcccaacctcaggtgatccatccgccttggcctcccaaagtgctgggattacatgcttgcgccaccgcgcccggccaacaggaggttattaaaggcctagttagttttttctggggagcctcgcctgcagatgtcccagcctgctcaccccacccatggaaggagcctttatcctgagagaagctacggagccctggaaagctggagccccacaggtagttaagattaaggtgaaaggaaactgggagggtcttactgataataaagctattgttttgaggcactttttagactttttaagataaaaacgtcagatttatgtaaaaaaatgaattagtattggaacaggagaaagtaccaactaattataaggtctctgtggcttgcaaaaatgtaggcagaaaagggcttttttcctagggaggagcaaacgagattagaaaaaagcggggaggggaatgacaaatggagggtgaaaaagtcagattttagctcagagaatgtcttaccctgaaatcaccgtgttcttagaagggacataagatggggttgtatgttttttttttttttttttttttgagacagtctcactccgtcgcccaggctggagtgcagtggcgcgatctcggctcactgcaagctccgcctcccgggttcacgccattctcctgcctcagcctcccgagtagctgggactacaggcgcccgccaccacgcccggctaatttttttgtatttttagtagagacgggtttcaccgtgttagccaggatggtctcgatctcctgacctctgaccttgtgatccgcccgcctcggcctcccgaagtgctgggattacaggcgtgagccaccgcgcccggccaaaatggggtgtatgttgactcagactgagggtagctcaaaattcaggagcctgagggagggagataaataaagtttgattaagaaatattttattttaggccaggcgcgatggctcacgcttgtaatcctagcaccttgggaggctgaggcaggccgaacacctgaggtcacagcctggccaacacggtgaaaacatggtgtctactaaaaatacaaaaattagccaagcgtcttggcaggtacatgtaatgccagctacttgggaggctgaggcaggagaattgcttgaacctgggaggtgaaggttgcagtgagcagtgagtcaagatggtgccactgcactccagcctgggcagcagagtgagacttcatcacaagaaaaaaaaaagaaatttgaccactgaagacatattcagctgatttttctaatgagaaaaaggagaaaatgtgcagtgtatgtctggctgtgtgacaggtaagaaaagagagcaccatctaagtcataatgggaagggtgtttctgtccatcagctttttctggagtacacaacaaatggagaattttattaatcacaaatgttttccatgattatctatgtgtttcatctttcctcatgtcttttctttgttgtatgcatttcttccttttggcttttcctgggctgcatcttatatattaaaccggtaaacataactacagtgttttgttcagttctgtgaatagctctaccaaattattgaacttcaggaaggtttcaggagtcccgagttttcaaacattagttcaaaagaatagatgggcccatagggtttgtgactggcatctgcagtgaggacaatgttgtgggaccgagggtctatgctgactttaggtgctgtcagaattcaaatattaggcaataagtttgtgttggagaaatgtttgatgttcagcaaactctacagatatggtgccagtaaaaagatatcacagaggcctggcctggaacaaaactctgggtgtttgggattgggaggctccactctcctgtacacaggctgtcacactgcccattgtcctgtgattccaggtcttctcccagggtgacagaggactgaaaacttagagaaaaggagctctgattacagacccccttttattgcagctatcaccacggtgttcccacccactcacaaacacacacactagacattaacgtgtccacactcctcccaggactaggcatcaccctcagaaacttcaccacggcatttttgatcctagtgtttcttgtgtttcttgtcaagaacccacaagtctctacaagtctactggcatgtctccaccccagacactgaatctgcagcagcaacctgttttctccaccatcctaggatctgggccacatgtttataatttcatctgcctacatgcacacagaaataaatcagagtacagccccacctgggccactatctgtagtgaaaatcattccattcacctacattgcactctctcccacccaggaattattttttttcttttagcttttatttttggttcgatgtacacatgtgggtttgttatacagttaaaattatgtcatggggatttgttgtgcagattattttgtcactgaggtactacccatagcaccaaacaggtgtgttttctgatcctcttagtcctcacaccctccaccctcaactaggcctcagtgtctgttgttctcctctttgtgttcatgtgttcttattatttagctcttaataacatgcatttggttttctgtttctacgttagtttccttttttttttttcctttcattttgttttgtcttttgagctggacttttgctcttgttgtccaggctggagtgcaatggtgcaacctcggctcaccacaacctcaacttcctggttcaagtgattctcctgcctcagcctcccaagtagctgggattacaagcatgcaccaccatgtctagctaattttgtacttttagtagagacaggatttctccacgtgggtcaggctgatcataaagttccaacctcaggtgattacccggcctcagcctcccaaagtgttgggattacaggtgtgagccactgcacctagcttttgcctactttttttttttgagagagagttttgctcttgttgcccagactggattgcaatagcgtaatcttgaccaactgcaaccttcaccttcgagtgattctcctgcctcagcctcctgagtagctgggattacaggcacctgcaccactcccagctaattttttgtacttttagtagaaagggggtttcaccatgttggccaggctggttttgaactcctgtcctcaagtgttctgcctgccttggctttccaaagtgctgggattacatgcatgagccaccatgcccggcctgcctactttttaatgaggttgtttgtttttttcttgtaaacttgtttaagttctttttttttttttgtgagatggagtcgcttagactggagtgcagtggcactatctcggctcactgcaacctctgcctcctgggttggagtgattctcctgcctcagccttctgagtagctgggattacagacatgtgccaccaccacaccctgctaatttttgtatttttagtagagacgaggtttcaccctgttggtcaggctggtcttgaactcctgacctcgtgatacacccgccttggcctcccaaagtgctgggattacagtcatgagtcaccacgcccagccaagttcttaataaattctggatattaggcctttgtcagaggcaaagtttgtaaatatttttgtttattttgtagattgtttactctgttgatagtttcctttgctgtaaagaagctctgaagttcaaataggtctcatttgtcaatttttgcttttgttgcagttgctttgggtagcttcctcatgaagtctttgccagtttctgtgtctagaatggtatttcctaggttatcttgcagggtttctcataattttgttttacatttaagtctttaatttatcttgagttgatttttgcatatggtgtaacgaaggggtccagctttagtcttctaaaaaatgctggctagttattctagcaccatttattaaagagagaatccttcccacatttctcttgtcagctttgtcaaaaatctgatgattataggagggtgacattatttctgggctctctattctatttcattggtcttgtgcactcatggattttatataacatctttctctcttctggttttaaccccactaacgttctttcaagcgcatacagtatgcaaaactcaggtgtccaagagttcaaaactccttaaaaacttccaaaaaaaggccaggtgtggtggctcatgcctgtaatcccagcacttttggaggctgaggtgggtggatcacgaggtcaggagatagagatcatcctggctaacatagtgatacccatctctactaaaaatacaaaaaaaaattagtcaggcgtggtggcgggcgcctgtagtcccagctacttgggaggctgaggcaggagaatggcgtgaacatgggaggtggggcttgcagtgagctgagatagtgccactgcactccagcctgggggacagagcgagactccgtctcaaaaaaaaaaaaacttccaaaaaaatttttgccattgtctcatttcttaagggatttagattatatatagttatttttctctgatttttaaaaatatatgtaaattatattaacagctaaataccttttgtcttttttctgactccagattatctagaacttcagatttattgctttgtttttggttccaaaaagtttattttttaatttttagtcctttaaatagacacagatttatttagataaaagctaattttaagggcacacagaagcttagcacaaagataggatcaaatttagcaatacataatggtaaacattaaaagatactatgtttctttgacagaaaccagattatccaaggaaattatccaatatttgcaggctgaagtacttatactgcaaaaagaagaacagttcagtgcgtaaactgaacagtggagtctgtagttgtgcctggctttctatttattacttcagaataattagcatagttatgtgtaatgtttgtagacaagctgcatttatatacatttaacagtattttgtttttctttctttctttcttcttttttttttttgagagagtctctgttgcccaagctgcagtgcagtggcatgatctcatctcactgcaactgctgcctcccgggttcaagcgattctcctgcctcagccttccgagtagctgggattacaggcatgcatcactgttcctggctaagtttttgtatttatagtagagatggttgtcaccatgttcgccagtttgatcttgaacttttcacctcaggtgatccacccatttcagcttcccatagtgctaagattacaggtgtgagccataaacagtattttctaaaatagtatgaatataaagccacaatacttactttgaatgaatcacttaaatggttattttaatattgtaatttatacttttgaaatatagtgttttggctgaagtatagttttaattattaaaaatgctacatatattatgactagtgagtaaacacaattttagtgtcttttatttcattaaattggtatgctgctattacaggacaaataaagacatgtgatgtggccacccaaaaaccataatagctcttcagtttgctatgttgcaagttctaatatattccactatatgaacatagtcagattctatttcttcatcaaaaagtgttgttggaagttgtcagatgtatttcaatatagaacctccattcaatggctaggagatgacagaacagcagagatgggaaagaaactttataaaaattcttctgaaaatctgccacctttcttcataatgctcatgtttctcttgctgagagtagctgtgcgctttgggtgtttagagagaaattgcttttaggagaatattttctggcagacatgatcaattttatatctaatctgagctttttcctaatatcattttaacttttttctctccagtgctttgggtgtctgtttcagaagccctattaatttttttttttttttttttattgatcattcttgggtgtttctcgcagagggggatttggcagggtcataggacaacagtggagggaaggtcagcagataaacaagtgaacaaaggtctctggttttcctaggcagaggaccctgcggccttccgcagtgtttgtgtccctgggtacttgagattagggagtggtgatgactcttaatgagcatgctgccttcaagcatctgtttaacaaagcacatcttgcaccgcccttaatccatttaacactgagtggacacagcacatgtttcagagagcacagggttgggggtaaggtcagagatcaacaggatcccaaggcagaagaatttttcttagtacagaccaaaatgaaaagtctcccatgtctacttctttctacacagacacggcaaccatccgatttctcagtcttttccgcacctttcccccctttctattccacaaaacagccattgtcatcatggcccgttctcaatgagctgttgggtacacctcccagatggggtggtggccgggcagaggggctcctcacttcccagtaggggcggctgggcagaggcgcccctcacctcccggatggggcggctggccgggcaggggactgaccccacctccctcccggacggggcggctggcctggcgggggctgacccccacctccctcccggacggggtggctgccgggcggagatgctactcacttcccagatggggcggctgccaggcagagggtctcctcacctctcagatggggcggccaggcagagacgctcctcacctcccagacggggtcgcggctgggcagaggcgctcctcatatcccagacggggcagcggggcagaggcgctccccacatctcatacgatgggcggccgggcagagacgctccttgcttcctagatgggatggtggctgggaagaggtgctcgtcacttcctagatgggatggcggccgggcagagaccctcctcactttcagactgggcagccaggcagaggggcccctcacatcccagacgatgggcggccaggcagagacgctcctcacttcccagacggggtggcggccgggcagaggctgcaatctcggtactttgggaggccaaggcaggcggctgggaggtggaggttgtagccagctgagatcacgccactgcactccagcctgggcaacattgagcactgagtgaacgagactccgtctgcaatcccggcacctcaggaggccgaggctggcggatcactcgcggttaggagctggagaccagcccggccaacacagcgaaaccccgtctccaccaaaaaagtacgaaaaccagtcaggcgtggcggcgcgcacctgcaatcgcaggcactcggcaggctgaggcaggagaatcaggcagggaggttgcagtgagccgagatggcagcagtacagtccagcttcggctcggcatcagagggagactgtggggagagggagagggacagggagagggagagtcgaagccctattaattaatcccatgatttctgattaagctaggctgtcacagtgagaacttttggagctatctctatctggactcatgctggaaattcagcagtattttttccttgtcaccattataagtagaaactgaggttgaaacactgctctcattttcattattgtgaatgtgtaattctacccaggaggcctgcaggctctcctcctgcagctcaggcctcactctctgatgtgacactagagtgctgctgtggcaaatggggttcatataaaatgtgagctgtgctctgggctgtgcctcagtggcagatggtagaggtcaagagagcatactagcaaccaggagaaagcaagcaggagtgctgtagcccactgccagtgagtacagagccactcctctaaactgtaactagccaaaatatagaacactattcaaccatttttgtagcagagtgaaatcttagcttcagcaggtacctgacttcaagctgctaaaataactcctgttatgaagatgtgaaaagtttatttgtcattgaatataagcaattagcatacacagatggcctcttcaatttccaggtagatttaagatgaacgatgtatgacatggtgctttaaattcttctacttatggactaattatgttgaccatctttctgtcattgcagtctcttaagcagatggactatgatgcatgtcacattcaagtttaattgtaaaataaaaacgtttgttttttgagatggagtttcactcttattgcccaggctggagtgcaatggtgcgatctcagctcactaaccccgcctcccaggttcaagtgattctcctgccttagcctccctagtagctgggattgcaggcatgtgccaccatgcctggttaatttttgtattttttagtagagagggggtttgtcagtgttggccaggctggtctcaaactcttgacctcaggtgatccacccgcctcggcctcccaaagtgctgggattacaggcacgagccaccacacccagccaaaacgttttctttctgttctattattgtggagtttttctggggctgtaaacatttgttctttttttttgagacgaagtctctcatcccccaggctggagtgtgatggcgcaaacttggctcgctgcaacctctgcctcctgggttcaagagattctcctgcctcggccctttgagtagctgggattacaggtgcctgccaccaggcccggctaattttttttttgtatttttagtagagatgggttttaccatgttggccaggctggtctagaactcttgacctcaggtgatccacccgcctaggcctcccaaagtcctgggattatagacatgagccaccatgtccagcgaagaaaattgttcttctcttttttttctttttgagacaaagtctcactctgtcacccaggctggagtgtgctgtggtgccttctcggctcactgcaagctccacctcctgggttcatgccattctcctgcctcagcctcctgaatagctgggactacaggctcccaccaccacacctggctaattttttgtatttttagtagagatggggtttcactgtgttagttagatggtctcgatctcctgacctcatgatctgcctgtctcggcctcccaaagtgctgggattacaggtgtgagccaccgcgcctggccaaagaaaattgttcttctaattattgtttccaaacactgtctagaattaccagacatgatataaacacataaggtgccaaccagaatttagcaaggcctttccctgtcaggcttccagtcaattcacacttgtgcagcaaagtgcatgctgtcccctaaatatgcaggcagaattgtgtctctatttgttatctatagtcctgtacattcacttctagagaggctagatcagatttctacaaatttcatagggcagcaatcaatcattttatctctttcaatgactcctgtatcttcagacttgaaacagattcagagaccatggggcccacaaacccagttagagtaacatgtgtgcattgagtagacatgttgacaagagaatctccactttcaccttcctcctcttgctaaaatgctcacaaatgtgcaggtaacacctgctgctcctcctgccattcaggccctaaatctacagctctatattttgaatccagatcttgagatttgggaaataaaaaacttttgtctaaataaagcaggttcttttggttatcaaactcagagacatgttaaaatgaaagtgcagttatgtctttctcccactttgaacgatgtattcatctattgaaactgttcactattggcacaagtgactataaattaaactaatgatgccacattggacactatcccatgccctaaaacataatgatagatatctaatcaataatcaatgttatttatgtaaataaataaaaacttttgacaaacaactctgcatcagcccactttctgtccctgtcttgtcttgacatatcttcctgtaaatactactaatcaaagtgtagattccaggcaacttgaatctttgctcccaggttataacccttaagcttgacccaaataaactgtctacttatattcatgttatgtcaccttttttttaaatgtagacttattatttagaatgtgttagagcagcctctatgagagctctcttttgactgtactccacttggtgtaacacaaaaggatgcagagccaagttgatcctacctagaatttgcagataaggtctgccctctgcctgggatttaaaaaaaaaagccagactttggatagagaatgtacagaaaattaacaaaagtcattttctgcattgtaagttgtcaagatagatatcttacaggccccatttgggagtgtggcattttgagatttttcacatcttgttcattggcctgctacagtgatgtgagaggctccaggaggaaatagaatctgatggcagaatctgtaagtgtaaataatcatcttaggagtgagagatcaaggccacaaagtatccagagccttgatcacaactataattacctgtaaaatgtgatactggagtagagtatttttgtttctttctctcatccaagagctagcaaatcaggacagatgatgtaggttctggagctccaccaaggcagttgttttctattcagaatcagcctgagtttctccagatggcttatcattgggccaacagccctggttcaccaggaattccctcacaatcacctaggtgtctttgaggcatttgaggatgtccagagcagaattgtgttaggctgacaagagtggttaattctgcttctgtctcagtgtaagagaaatgagtcatcctgtgttcattcatgccctcatacaagaggtgccttttttggtacccagatcagagtttctccagtttcctggtacttggatgataaacaaggaggagatctggagacccaaatagataaactagttgcttccatttcatatggccattaaaaaaatacgtgaagcagtcatggttcctacagtccagaaacttttagtctagaccagcaactggataaataattgaattgtgcattgtatggttggcacaatatatagatgtgtccagaaccttgggttttatttaggccactttatgccgttatgacttctgaattgtacacctgaagggatatttatgaatagaataattgttattataattttttttctttagtcagaatctcactgtgttacccaggcatgagtgcagtgacatgatcttggctcaccgcaatttctgccacttgggttcaagcgattctcctgcctcagcctccaaagtagctgggattgctggccccagccactgtggtcaggctggtcttgaactcctgacctcgtgatccacccaccttggcctcacaaagtgttgggattacaggtgtaaggcagtgcacccagctgtataatttctacttttttttaccttctaaagtgtacatattgattttctaataaaattaccctagaaaaccttaagggatttgtttaaattgtgtattagtatatagtataaagttgacagggcagtggctagaaaaattaaaattataggaactctgggatttaagtttcttttaggtaagcttagaagaaacaaaactggaagtaccccagtggcatagagaacagaattctacataagtcctcacactgcctgagacctgatcagattcatgctttttggaggcgttatttaggtctgaccctaccctggagtcttgcctcacaggactgattagtagagatcagagttttggctggtgaatcctgctgcctttctagagctggtgctcacaattccctgaatcccaaaagcagatgaaagggaaaaatagtccgggcgcggtggctcacgcctgtaatcccagcactttgggaggccaaggcgggcagatcatgaggtcaggaaatcgagaccatcctggctaacacggtgaaaccccacctctactaagaatacaaaaaattagctgggtgtggtggtgggcgcctgtagtcccagctactgaggaggctgaggcaggagaatggcgtgaacccaggaggcggagcttgcagtgagcccagatcgcgccactgcactccagcctgggtggcagcgagactccatctcaaaaaacaaaaaaaaaaaaagggaaaaataaagtacgtattttagggtcttagtttttaaattttctgttaaagccagtgtttgcagagacattctatttagcaacttgttttctattcttgcagatccagtagttgctccacaagtcacagaaaagtaaatatgaacagaataaaattttctctaaattacattaaattattcctttctatctctttcatctgtctatattttgcttttacagtgttttaaaaaaattcatgacagagaaacagaagaagaaataaaaatgccgcaccctttacctaaatcctaaagtttattaaacacttagtaccagctttcagggtgttatgagaattaaatcacagaatgtgctatgcccagcacagtgctctgtatcattctcttgagcacaaagtacctgcttaataaacattgcattagtacttgtgtacatgttgttttttaaatacagacttactctgtcatttctgccttcagtttcctctataaactttaaagagccagcgaagcatataaaactttagggtggagatgcgttgtccctatttgtatcagaagtatttggttgtgaaaagagtgctaaatgtaagggaccctgtgctgttcctgctttctctaactaatgctaataatgagccaaggggaagcaacttcagcattgacaggggacttgtttaaaacacccattcatggacccttttcaagcctccagaatcacattacataaagtggacccaaaattaccaagtgatttataagcccattaaagcttgagaggcaatgcttagcttagtgattaccagcccaggcttttccttaggaacacatggccaatttgcagaaacctcttgtgccctccccacagcttctgtttgttctgcatggaagcacttatgttgttttaatgaagggtctcatgtgactctaaggtgaggccagaatcaagtatgagcacttcaaaatacaatacaaaggagttaagttccacctttgcactaaagggtggtcacagggcctgttctgtttgggtttggtacagacaggtcagtgtggtgcataattccattactggaaattgctggtgtctgtggcagggagggcacctgaggacaggaaatgagaaacttatatttctatcttcatggagcaattcattgttccctgaatctcttctgtttcaaaggacagaaataggtgggctttttctgtcattttgccagttgatgtcatgccagcaggtaatcatgtgttactgatacctttaaaggcatgttctcaagatgcaggtgtaatttttccagagaatctcatctgagaaggaattccagaggaggaggaggagaaaaaaaagtggctcttcttaaggtaaacgtgtctcagatgaagagctgtgtccactctgcctcctggacccccatgagtttagtactcacaaacctttacttctctacttgtgttttccctccctgagtttggttttactacttaaaattcttatgatagtcaagggtctctgaaaaatatttctttcctatatcccagagctttctctgcattctctatgtcatagcttcttatatgccatgcagaattctcagcaagaatttgtaatctgcaatattaaaaatgttccctttgtggctgttgaacatggaaagatgtggatactcaagatttctgttggggaaaattgtggtccttagtatagatgaagaacatgtaatgttgaggcttcatctgtatgttccattagctctatgcagaacaggattaagaaaatgcttttttatatggaatggcatttattatccagaaagttctgaaagaaattattaggagatacctgctctcttgggtgctaaatgaagcctacttaaaattactactaaaaattacagaacataggagttatcaaaaactttgaagttagcataaaacatgtttctttatggttaaattcagattttatttactttctttgggaggaatatttcaacagtgatgctgtgttcttctgtgtgaattaggacatcataaaaatttatcgtagtgcagttaatggttaatgattcagttggtgaaatagctctctgacagatttttttcactatagagataattatttttctattcattattatgtttatgcagctgatatgcataaacctcacattaaatctggcagctttcttttttaaacatatttttcttagggaaatgaagcctcttatctttgtttacaggctagaaaatctgaaaaaaacacaggctcttgcacttactgcatttgacaaaatatcatttttgggacaaaaacattaacattattggtgagcttgttagaaattcaaaaaatcagactttatgccagatcttttggaaaaaaaaatcctgcataagaaggacttcagcttattgtacatgttaaaattggagagatgacttctaactcaacatgtcttttctgtctgaaaaatattcataactgattctgtatgatgtaaatatagcactcaaaaatgtacatgttcatgttcatgccctttattttatactttattatctagaaaaatatcattatatgaactaatgttgtggatcttaggctgctcttttttttcagagatagagaatacattagaaaatatttctgtattgaaaattattttattggataattttagtcaatcctataagtaagaatcagttctcttactctctcatttcaccttaaattaaaaattccaccaacggcgacttggtgaaaatgtgtgtgtgtgtgtgtttttcaggaatcattgcaatttagagatgtggctgtagaattctctctggaggagtggcattgcctggacactgcacagcagaatttatatagggatgtgatgttagagaactacagacacctggtcttccttggtgaggataacttaaatacataattcataaaaaaccccaaaagttttatttctcttttttgcagaatgattttagtaatttatcctttgcataaaagagttccagatgtcctttttccagaaaatcttcagaatttgtttatttagaaaagaatttcttcaagatgtttcatcttaatccaaactttccacattgctgagttgagctttattcttcactctaaattagtggtaatttcagaaatttagtggcataaaatagtgttgccctcagctgaaaatctcattgccaccatcagtttttgattcagtagtatcaggtagtaaatttaaaaagccttcatgcagggccaggcgcagtggctcatacctgtaattccagcactttgggaggctgagacgggcagatcacctgaagttgggagtttgagaccagcctgaccaacatggagaaaccccgcctatactaaaaatacaaaattagtcgtttatggtggcatagtcctgtaatcccagctactccggaggctgaggcaggagattcccttgaacacaggaggcagaggttttggtgagccgagactgagccattgcactctagcctgggcaagaagagcaaataccactctaattttgataggaagtttattgaatctatagatcactttggataatgtggcaatttaaaaatctatttggatcttctcttcgtagatttttattgtaaagattttttaccttcttagtaattttttaaagaaatttattatttaatggtatagtaaataagattttttctttctctattttatcagatagtttaagtgtttgagaccatacatatacttgtatgttaattttatgttttgctaatttgctgagtgtatttgtcagtttagaaaggttttaaggtattgtttatgttttttttttttttttttttttttgagatggagtctcgctctgttgcccaggctggagtgcaatggcatgatctcagctcactgcaacctctgcctcctgggttcaagcaattctcctgtctgagcctcctgagtagctggtactactacaggcacgtgccgctgcacccagctttttgtattttagtagaaatggggtttcaccatgttggccaggctggtctcaaactcctgaccttgtgatccacccatcttggcctcccagagtgctaggattagaggtgtgagccactgcaactggccctatttatggtttttaaagtactgcttaatgttttttaaatataagattgtatgatctataaacagcaactttttacttattttactccatctccaaaaaaaaaaaaaagaaaccttaaagttgaaagtattttctaaatatttagaaatttgttatgaattagtattttggtattaatttactagaatattttattacattctttctgctgagcacattactagcttgtaattgagaaatataagcaagattaatgctatttatttttaatgaaacaggtattattgtctctaagccagacctgatcacctgtctggagcaaggaataaaacctctgactatgaagagacatgagatgattgccaaacccccaggtaggtgcgaatgaaaatgaacacaacagacaatgcagataagaggtcccaaggtcaaaaagaaagccagtccttaaaatgtgatctgggaagctgtgttccaaaggaaatagttcctgggcagctgttttatttatttatttatttatttaatttttctctcacaaagggacatctgtctcatgcttttaaattctctaaggattctactattctttcggtgagcttccttcaagttcacagtgagagcgaaattcctctttatggcatataagtgattgcacaatctggctgcttttccgttgccttggggacacacaaatatctgcgtgattttgagaaactaaaacccttttttaagttgtctttttgcttcagatctgaaatgtgtgacagtattagtttttgttgcattttttgttcattttttctgcacagtccattctgtttttattactatatagtcttgaaatatagtttgaaattataagtatgatatccttctgctttgatctttttcctcaagattgctttggctatcaaagttattttagtatcacgtaacttttagaaatgtattttccattactatgaaaaaaataccactgcaattttgataggaggtttattgaatctatagatcactctggttaatacggcaattttaaaatttatttggatcttctctaatattttcataggtttttttttttttttttgagaaggagtcttgctctgttgcccaggctggagtgcagtggtgtgatcttggttcactgcaaactctgcctcctgggttcaagcaattctctgcctcagcctcctgtgtagctgagattacaggtgcatacaaccatgcctggctaattttttttgtattttttgtagagaggggtttcaccatgttggccaggctggtcttgaactcctgaccttgtgatccacccacctcagcctcccaaagtgctgggattacaggcatgagccaccccgcccggcccatagtttttttattgtaaagatttttttacctccttggtttttttctaagaagtttattacttaatgctatagtaaataagatttttttcttcctctattttatcagtttgttttaagtgtatgagaccatacatacacttgtatgttaattttatattttgctaatttactgagtgtatttatcacttcagacaggttttaatgtactatttattgatttttaaatacaagattatacgatctacaaacagcgactttttacttatttttctttaatttcaatggatttttttatttctttgactaattcttctgccacatgcttccagtgctacattaaaatagaagcattgacaatgggcacaatatagttttgtattggtgcctaaatttgatggagcaaacacctcttcaagtttttttttttttttttttttgagagagtctcactctgttgcccaggctgcagtgcagtggtgcagtctcagctcactgcaacctccacctcccgggttcacgccattctcctgcctcagcctcccgagtagctgggactacaggcgcccaccaccacacccggctaattttttaaaaatttttattagagacagggtttcaccgtgttagccaggatggtctcgatctcctgacctcgtgatccatccgcctcggcctcccaaagtgctgggattacaggtgtgagccaccacgcctggccttcaagtttttataaactgattttagaaggtaaagatcttttgttgggcccttagggtgatgagatgccctctgaatttgtagtggagagggggtgtagcttggtgacaaggctgctgggtctgcactagggtccacctttagttggcttgttacaggggcttgggtagttgtacttctcattttatttttggacagactgcatatccttcagggctttgctccgtagttaaaacactagggtatgtttttgtagtcaggtctgcatatggtgggccttatatctggatattgatgagtatggcttttattgagtatcagagagcattccctcagataactgtgggtttctatataggcagaactgaccataaactatcttgtttaagtgagtagtcatggagatagtcttttttttcaccatgtgtttaatgatgaatatatatttccttttgtgagagaaatacttgtttgatttgaaggtaattttcaaaaagatttataattctggattttttttcagtttttctttaaaaaaattgttttaaaaacacataacataaaatttaccatcttaattcaagtgtacattttcagggccaggcatggttgtggctcccatctgtaatcccaggattttgggaggccaacacaggaggatccctggagcccaaaagtttgagaccagcctgggaaagatatggagacccctctttataaaaataatttaataattgccaggcatggtggtatgcagctgtggtacctgctacttgggagatggagggggagtcaaaattgtgccactacactccagcttgaatgacagagtgagaccctgtctccaaaaaacaaaaaaaagctgttcatttcaggcatgttaagtatattctcattgttatgtaaaatacttctagacactttacatcttgtaaaactaaaactcaatacccattaaataacaactgctcattttaccctctctcaccctcgacagacaaaccttccactttctgttttatgatttgactacttaagatatccataattttgttactggattaattcaagtgacataatattctcaatgttcatcttaaaatgtgacaagattattctttttaagatggaataatattccattgtatgtatatgttacatattttgatgtgtttataaatcaagagacatctgggttgcttcaaccttttggcttttgtgaatactggtgcaataaacatggattttcaaatatgtcttccaggtcctgtgttgcttttctttttttctagagatggattctcactctgtcacccaggctgaagtgcagtggtgtgatatcagctcactgaaacctctgcctcctgggttcaagcaattctgcttcagcctcccaagtagctgtgattacaggtgcccaccaacacacccagctaattttttgtatttttagtattatggggtttattatgttggccaggctggtctcaaactcctgatctcaggtaatcacccaccttggcctcccaaagtgctaggattacaggcttgagcacctgggcctggcctgtgttacgtattttgtaaatagatataataagtgaggaacatttataacatttttaaataatggctgcatctttgttttccagcaagaagcaacatgggtttcatttttattgcaacatcaacagattgggtgtttttaaaaaaatttacagtggccattctaatggatatgaggtgattttgtttgtcattgtgtttttttaatttctctacaaatcagtaattttgtgcattctttcaaatgctttttcccatttgtgtagttttttgatgaaaaatctttttgttcatttttaaatcaagttattgaactttattgattagttttaagagtttttatttattttgaacattaacttccttcacatgaaatctgcaaatgttttcatccattttctaagggatgttgccacttttgaattttcttttgatgtacagaaattttgatgtctagtgtagttaaacttttcttgtatttgttgctcatgcatttaatgtcgtatctaagaaaatggtggcaagaccaatgtaatgtccttttcctgtattttttctaatagatttgttagtttctttatgtctaagtattttgtttaaaatatatttttgtatcgttcaaggaaataacccaattttattttatcagtgttgatattcagttttcaacatcattttttgaagatattacttttctctattttgtactcatagcaactttttgaaagaccatttgatcatatatagaagggttcatttctgagctctctattctggtctttcatctgtttatctttgtgtcagtatcacattgtttatgttactgtagcctttaactgtaggttgtattgacatctgtgaagaataaaattttttgacccctgagcaagaatatgttgaatcagagtgttttatattcacatatttttgaatttgccaatttaccttttgcttttaattcctagtgtcattcagtttttgttagaaaacacacaatgtataattttagtgtttttaaattgatttgttgttgttttaagacaagatcttaccaacaccaaggctggagtgctgtggcataattttggctcactatagcctcagcctcctgggctcaagtgatcctttcacctctgttttctgaccagcttggactacagacatgtactaccatgtctgcctaattgtttgcttgtttgcagtgttaggatctcattatgttgtccaggctggtctcaaacttttggccctaatggatcctcttacctaggtctcccaaagtgttagggttataggcaagagccactgcaccccgtcagtacttttaaatttaataaaacttggtatgtgtcctaacagattataccagatgcaaataagaatattgtgtattatcttggttttgactggagagttttgcttgtgtctgtgaagcctagttggtctataatatggtttccatgttcatgttctccagacctcatgctgcaaaataaatcttcaatgttggatgtgggacctggtgggacatgtttgtgtcatggaggcaaatttctcatgaacggcatggtacatcctcttggtaaccaaaactttacactctattaattcaaatgagagctggttcattaaaagaacctggatccttcacctcacacttgctctgtttcattaacatatagtatgtccaattactctttaccttccaccatgattgtaagtttcctgaggccctcaccagaagcagatgctagcacacacttcttatagtctgtcaaactgtgagccacataaattatttttctttaaaaattatgcacttggctgggcacggtggctcatgcctgtaatccctgcactttgggaggccgaggcgggtggatcatgaggtcaggagatcgagaccatcctggctaacatggtgaaaccccgtctctaccaaaaatacaaaaagccgggcgtgctggtgggcacctgtagtctcagctacttgggaggctgaggcaggagagtggcgtgaatctgggaggcggagcttgcagtgagctgagattgctctactgcactccagcctgggcgacagcgagattccttcaaaaaaaaaaaaaaattatgcactcggctgggggcggtggctcacacctgtaatcccagcattttgggaggcccaggtgggtggatcacgaggtcaggagatcgagactctcctggctaagacggtgaaaccccgtctctattaaaaatataaaaaaattagccgggcatggtggtgggcgcctgtagtcccagctactcgggaggctgaggcaggagaatggcgtgaacctgggaggcggagcttgtagtgagctgagattgcgccactgtactccagcctgggcaaaagagcaggactctgtctcaaaaacaaagaaaaaaagaaaaagaaattatgcagtctcaagtattcctctgtatgcaaaataatatggtctataatgttgcgtaagttgtctgtttctcattttttctctgaattttctatttattattgcaaatggggtcttgatgtctacaatttttatgttgctatgtatgccttgcttcacttttgtcaatatttgctttatatattttggagccctgatgttatatacacatatacatatagatagataaataatatagttaccgattcctggtaaattaactcactttaccataatataatatcattctttgtctaatggtagtatttgacctatagcatattatgtctaatataattgtgaccacctcactcaattgtggttactatttttatgatatacacatttttttccttctgttactttcagcctatttgactcaatgctacaatgagtctcttgtaggcagcatactgtatgcttttaaagaaaccactgaggcattctatagctttttcttcatatgtatatatttatttatgtatttattttgagacagagtttcacttttgttgcccaagctggagtgcaatggcgtgagctcactgcaacctctgcctcccaagttcaagtgattcttctttgtcagcctcccaagtagctgggattacaggcacctgtcaccatgcccagctaatttttttgtattttaggtagagatgggattccaccatgatggccaggcttgtcttaaacttctgacctcaggtgatctgcccgcctctgcctcccaaagtgctgggattacaggcatcagccaccacgcctggcctcatttaactttgagatagggtctcactctgtcaaccaggctgatttgcatgattcactgatgccagaacctccaaaactcagatgatcctctcattttagcctctcaaacagctgggttacaagtatgtgtcatcatagccatctatgttttttgtattttttgtagagacagagttttgccatgttgcccaggctggtcttgaactcatgggatcaagtgatgagcctaccttggccttccaaagtcctaagattacatttgattttattaagtagtataattaatttatatttacaatgaataaacaaatgaagttgtcattagcagttagattgttactgttttatgtgtttctagtagttatatttttctcatctcctgttttactttcttaattttcattttattttgtactggcatgctttcattactttttatcttcttttgcatactttctataaatattatctttgtaatcatcttgaaaactggagattacatacatcttaaagttaaaacaatatgtttcaatctcataacttcaactgaatacaaaaactatgcctctatattttatggtttgttactgatataaaaattattttatatggtgtatctattaacatttatgcagatttacatatttcttatattttattaaaaaactttaaagtttttatgtaccatcttttttttttttttgaaactgggtctcactctattgcccatgatggagtgcagtggtgtaatcttggctcactgtaacctccaccaggcatggtggctcatgcctgtgttctcagcactttgggaggccgaggtgggtgaatcagaaggtcaggagttcgagagcagcctggccaacatggtgaaacgctgtctctactaaaaaatacaaacattatccgggcatgctggcaggtgcctataatcccagctcctcaggaggctgaagcaggagaattgcttgaacctagaaggcggacgttgcagtgagccaaggtcacaccactgtactccagcctggacaacagagcgaaactccgtctcaaaaaataaaaaaaaatatgtcttttgattggaaagatgattatatatatatttaaatcgttttctgcaatagaaaaacttactgttatttttattaattgttttatttgattcttctatctttttcactcattttctgtcttttttgtgtttttttaattttttgtattgatatgctttcagtttcttattttcttttgtgtatctatacagctattatcttagtggtaacatgggggattacataaaacctaaaagatccaacaatatatttgaatgtggtaaaaaaattaacttcagttatatactgaaattcttcatcattacatttgccttcaactttgttactgattttgctaattatattttttatgttgtatatttattaacagatgttaacaataatttctatacttttatcttttaaatttagagagtattaaaaatgttttctgtaccattatgatgttaagaaattccatttttgtgtatgtggatatcttttccagaaagttatgtattttcatagattatctgttgttttcttgcattatgttattttcagtggaagaaactccttttagcatctttgatgtgtatggtgtatgcagtgccaatatactttctcaggatttggttattttggaagcacttgttttatttggtagtacaattttgctgatggcattattgcatttgacagctttttaaaaaaattattataactttagcaatatcacagtttttttctgacgtgtaagaatgttttaaataaattcactggtgccggttgtggtggctcacgtctataatcccagcactttgggagactgagacgggcagaccacctgaggtcagaagtttgagaccagccaggctaacatggtgaaaccctgtttgtactgaaaatacaaaaaagtagccaggcatggtggcgcacgcctgtaatcccagctactcaggacgctgaggcaggagaatcccttgaacccgggagttggaggttgcagtgagccaagattgcatcattgcactccagcttgtgcaacaagattgaaactctgtctaaaaaaaaaaaattctctggttatctcatgagactatgcttataaatggaacatcatttttatcttgtagcacccaaaattctattcttatatgtgatttttgaaattttgcttatatatgtgtttgttataaatatatttgtgtgtatctaagtttgttcattcagctttttcatgtttacatcatattttcttttaataaatttttcagttttttatattttttatatccacgattttcggttttttggtattttagtatttctttttatagttgtctgggtttctatttttttcttatacagagtctttttctgtcaccgaggctggagtgcagtggcgtgttctcagccaggctgatcttgaactgctgacctcaaatgatccacccacctcagcctcctaaagtgctgggtttacaggcatcagccactgcacccaacctttttaattttatttttgagacagtgttgctctgtttcccaggccgcagtacagtggtacaatctccactcactgcaacgtttcccgcctggattcaagcaattctcctgtgtcagccttacaagtagctgggattacaggcacatgtcaccatgcccagctaatttttgtatttttagtagatacagggtttcaccatgttggccaggctggtctcaaacttctgacctcatgtattttcccaccttgatcttccagtgtgttgggattacaggaatgagccaccaacagtgggatgttcaattcatttggaattttaaaaattactttgtatactttttatggttgcttttgaaaagtttataatttttttgatggggccatgttctaatatttggtatacattatcatctttgatagagatttggaaattaacaaaaagctacctgttacaatctttataatatagctttgtcctggcgtagcatgaaatcaattgtcttggctagagattctgggaatttttcaaacatgtttttaggatgagtcttgtctaaaattttgtgtttattgtttagttaaatcagcttattcatatctcttcttaatagtcagtaatcacctgctacacccattccctgtttgcagtttctctgcttctctataatttacctttagactcagcaaactcaaactgtcattccaatgtatatcaccatttttttttagcattttatgtcatgggacacattatctggtgtctaaaaaagcccctagaagacaaataaagatgtatgtgccaatgtttcttgttttttaaaaaggaaaccaggagttggcaatttacatttttgtgtgtatgtgtgagacagagtctcattctgttacctagtctcaagtgcagtggcatgatcttggctcactacattctctgcctccacagttgaagcaattctcctgcctcagcatcccaaataggattacaggtaactgtaaccatgcctggctaatttgtttgtattttagtagagatggggttttaccgtgttggtcaggctggtctcaaactcctgacctcaggtgatcctcatgctttgccctcacaaatttctggaattacaggcatgagctatcatgccttgttggcaatttactttaaaaaaaaatttttttttgagatgaagtcttgctctgtcgcccaggccggagtgcagtggtgcaatcttggcttactgcaacctccgtctcctgggttcaagaaattctcatgcctcagcctcctgagcagttggaattacagcggcccatgaccatgactggctaactttttgtaattttagtagagatggggtttcaccatcttggccaggatggccttgaactcctgacctcaagtgattcacccatctcagcctccgaaagtgctggtattacaggaatgagccactgcaccaggttggcaatttacttttaaaggcacaatgttatactggagagcaggaagagctgttgcatataagtaacagaattttctttatcttctatgtgactgtttgcattgtgctcacctagggactttcacacacttaaaactcacttataaattttttacaaatgtattttggtcagtatgtttttgttacctttatatgtccaggaagaaattacagcttgtggcattttgctatgtcatcttgcttatgtagtttgtataattttataggttagatttgtaaagtatatttatctgagtctagcaattgaagtaatgtgtttttattgtttctttcagttgtgtgttctcattttgcccaagacctttggccagagcagagcataaaagattcttaccaaaaagtgatactgagaaaatttgaaaaatgtggacatggcaatttacactttaaaaaaggctgtgaaagtgtggatgagtgtaagttacacaaaagaggttataatggacttaaccaatgtttgacaactacccagagcaaaatatttcaatgtggtaaatatgtgaaagtctttcatcaattttcaaattcaaagagacataaaagaagacatactgaaaaaaaacctttgaaatatatagaaggtgacaaagcttttaaccagtcctcaacccatactacacataaaaaaattgatactggagagaaaccatacaaatgtgaagaatgtggcaaagccttcaaccggtcctcacaccttactacacataagataactcatactagagagaaaccctacaaatgtgaagaatgtggcaaagtctttaagtacttctctagctttactacacataagaaaattcatagtggagagaaaccctacatttgtgaagaatgtggcaaagcctttatgtacccctatacccttactacacataagataatccatactggagagcaaccctacaaatgtaaagaatgtgacaaagcttttaaccatcctgcaactctttcttcacataagaaaattcatactggagagaaaccgtacacgtgtgataaatgtggcaaagcctttatttcatcctcgatccttagtaaacatgagaagattcatacgggagagaaaccctacaaatgtgaagaatgtggcaaagccttcacccgctcctcacaccttactatgcataagataattcatactggagagaaaccatacaaatgtgaagaatgtggcaaagcctttacatggtctgcaggcctccataaacataggagaactcatactggagagaaaccctacaaatgtgaagaatgtggcaaagcgtatactacatcctcaaatctaactgaacataagacaactcatactggagagaaaccttacaaatgtaaagaatgtggcaaagcttttaactggtcctcagaccttaataaacataagagaattcatattggacagaaaccaagaacgtgacaaaggattattttattattattatttttttgagaggtaattctgctgttgtttcccaggctggagtgcaatggcataattttggctcaccacaacctccaccttctgggttcaagtaactctccttagtagctaggattacagggctgcaccaccacacctggctaattttgtatttttagtagagatggggtttctccatgttggtcaggctggtctcaatctcctaacctcaggtggtctgcctgctttggcctcccaaagtgttggggttacaggcatgagccactgtgcctggctgacaaagctttttaaggaagttctcaacccttattacacataattcatactggacagaaaccctacaagtgtgaagaatgtggcaagcctgtaacaagttctcaattcttttatttttatttgtttatttattttttgagatgcagtttcactcttgtgacccgggctgtagtgcaatggcatgatcttggcttactgtgacctctgcctcctgggttcaagccattctcctgcctcagcctcccaagtagctgggattacaggtgccaccaccattcccagctaatttttgtatttttagtagagatgggcttttgccatatttgccaggctggtctcaaactcctgacctcaggtgatccactcgcctcggcttcctaaagtgctgggatgacaggcatgagcctcaattcccagccataagctcttaattcttaagagacatggcgataattcatggtgaagaggaactttacaaacctgaaagatgtgacagtgcttttcccaacacctccaacttttctatgcataaaaaaaattatactacaccatagaaatgtatgaaatgtgacaaagcctttatatggttgccacactttattgtaggtaattcatacttccaaaatacctacaagtatgaagaatgtggcaaaacttttaatcagtgcttacaccgtatttcacaggaaagctattatccttgagaaaaattgtacaaatataaagaatatggaaaagccattaatgtccatcacatcttactcaacagaagaaggttcataaaagagcaattactgtgacaaaaatctttcagaaaatataagcctttaaggtgaagaagagtattgattctgaagacaagcattacaaatataaagaggtttgtagtacctttgcttgtattacagatcttattgcccgcgttttgtattagaaggaaaccctaaagcggttgccaaactttgtgcaacatcagggaatgtatattgaagaagattcctgcaaatgtaatgagtttggaaacacttcttagataaattatttgtggctgggcacagtggctcatgcctgtaatcccagcactttgggaggccaaggtgggaggatcacctgatgtcgggagtttgagatcagactgaccaaaacggagaaacccagtctctactgaaaatataaaattagccatgcatggtggcacatgcctgtaatcccagctactcaggaggcttgaaccctggaggcagaggttgtggtgagtcgagatcattgcactccagcctgggcaataagagtgaaactctgtctccaggaaaaaaaaaaatttatttgtgtataactttaaaagcagatttttggaagcattgtaattacattaaaagtatacttgttccagctgcgtgtggtggctcatgcctgtaatcccaacactttgggaggccaaggcaggtggatcacgaggtcaggagttcaagaccatcttggccaagatggtgaaaccctgtctgtactaaaaatacaaaaattagccatgcatggtggccggcgcgtataatcccagctgcttgggaggctgaggcagagaattggaattgcttgaacctgggaggtggaggttgcagtgagccgaggttgcaccattgtccagcctgggcaacagagcaagactccatctcaaaaaaaaaagtgtatttgtttccttaaaaaaatttttctgaaaagtgggtaatgacataatacagctttcaaattactttatgctgttattttattcttattgtattcacatgtgaaagcatgtgatcaatttttgctgcatcagagatattagagatagttttttattaattgggcatttatgaccttttctataaaagtaaggacattaaaatgtaagatgcatgatgaaaatataagtggagaggctctttgtagttaacctatatgaagtaatgtataaggtaggtcagagtaatacttttctacattatagtgcaagaaataattattgataaaagtatattaaactaaattcgtatattttacttattgtacttttatgtaataaaatgcagtgcatttaaaaattgttagattatgtgtgaatttaattttatgttttttaccatgttaagactattgtgcatttaatgaagcattattatgccactaacctatcccaccttactcaaaggtgtaggtaaaagatggtagcaatatactatttggtacataatggaataatgtctctagtaatcactttgccagtggctttaaacagcaaatgaatttaagaatattgttcccataggttaaatttttattctcttttcttactgaaatttattattagtatttgtgagtatatagtatatgtatatatttatgctttatatggcatattttgattcaggcctataatatgtagtaactacattagggtaaataaggtatctatcacctctagcatttatcctttgtattaaaaacagtgtaattatatacttttagttattttaaaatgtacaataaattgttattgactacagggttatttttatgatcataataaaaattatacagaaatataaataaaatacagccaggcccagtggctcatgcctgtaatcccaatactttgggaggacaaggcaggtggattgcctgaggtcaggagttcaagactggcctggccaacgtggtgaaacctcgtctactaaaaatacaaaatatagttgggcattgtggtgcatgtttggaggctgaggcaggagattcacttgtaactgggagctggaggttgcactgagctgagattgcaccacttcactccagcctgggcaacagactcaatctcaagaaaaaaagaaatagaaatcatacatatactgaaaacttattaataaatgtttgttatatggttttctttgaacatgtggtctttgcctgcaaatgtagactttcagtgttaatttacatcagttaaatatacacatattactctgaagataaaccttagatgtaagaaacttatggagtgtgtttgtgtgagcatgagattgtacatattttcagaagaaaagaacaattattggaacaaaacaaattattttaataaggtggctaataaaaaactaagctccttgagaatgctgaaagcaaatctatgctttctgctttgtcttgaatttattaatataaaattttatggcttatgtttcaaatttttttcagaatctgtctattaaagtacaggcagctttgtctccagaaacaacgctcttgagtacaacaataaaagccctcttcaaacagaaaacaaataatcatagttaacacttgttttaatgaaaattcaaccaaaattaaataattagatatatttttattgtcctatgtgtgtgtgaatgtataaaatggtgcataaaggaaaaatatgccagaaaaaaagttaatatttgtaatgaataaaactggaaattagttcattatttgcaggtgatatctttgtttatgtagataacaaaagcagcagaaaactttcacggagtctctctctgttgcccagggtggggtggagtgcagtggtgcgatctcggctcactgcaagctccgcatcccgggttcacgctgttctcctgcctcagccttccgagtagctgggactacaggcgcccgccaccacgcccagctaattttttgtatttttagtagagacggggtttcgccgtgttagccaggatggtcttgatctcctgacctcatgatccacccgccttggcctcccaaagtgctgggattacaggcgtgagccactgcacccggccaaaacctttttttttttttccaaagaattataaatagaagattctaaagagaagtttttaataaataagcatttaaaagaaactagggttacttgttatgtttaaaatatatgctgttctcacacaaaatgaaactgctgaaatccaaatttagaagcaaagaatagacttaaattgttaaacatagaaaatataaatatatactttgaagaacaggattaggcaccttgatacgtgaaagaaaatattaggaaataaactattttattcttcagatacaggctgaagaaagtagatgaaaaccctgtaattcctttttgcctgcagcaaacttaaatttataagtaattattttggtaaatatggagtgcctactaattatgtaatttacttcatgcataacatgcaaattctagcatattgtcataaataaatctaaaattacagacaaatttgaaatagaaaatagtcaaaatgtagagggcgagtgacatcagtaagatgaaagattaaaagttccctaattttatatccccttacagcaaaaaacatcggccatccctgacaaaaatgcctttattggctgggcacagtggctgatgcctttaatcccagcactttgctgagatctgctgagacgggcagatcacgaggtcaggagtttgagaccagcatggcaaacatggtgaaaccctgtctctacaaaaataccaaaaaaataggcagtcatggtggcacacgtctgtaatcctagctactcaggaggctgaggcaggagaattgtttaaacccgggaggcagaggttgcagggaggtgagatggcaccactgcactccagcctgaatgagagagtgtctcagagaaataaataaatgcctttattagaaaaccaggcattatggctcacacttgtaatgacagctacatggtacattaatgatggagaacagcttcaggccaggatttcgagaccagcctgggttatgtagcaagatgtcatctccaaaataagtgcctctatgagagatgtgagatccagggagggagttgtgaaactgttaaagcttaaggttgagaagtgttctattcagaaggcaggccctcattcaggtggaaaactatatgacccctgttctaggctacagaccaggatagggttcacccaacttggtcccactaagaattctgaacttactgtgtaatcatctgaaactcctccagccacagtctggcagaggtcttgccattccagagacctggaggaaggtgcccattcacagccatctaggcaggcctgcagaccttggcctgtacaggggtccctgaagtggttcagtgactcagtttcagttacctgagccacagttcatggccagttcggcctacatagaaagctacagagttacttgaaaaaataatctctggtactcactgaaagccatactcatctacatcctgatacaaggcccaccatatgcagaaccaacttcagaaacattccttatgtctgccctatggagcaaagtcctgaaagatttgcagtctgtccaaaaataaactgggaattacaattacccaagcccctgtaacaagccaactaaagatggaccctagtgcagtcccagcagccttgtgaccaagctgcaacccctcttcactacaaattcagagggtttctcatcatcctaagggaccaacaaaagaagatctttatcttctaaaatcagtgtatgaaaacttgaagaggtgtttgctccatcaacttcagacaccaatacaaaactatactgtgcccattgtcaacacttctattttaatctagcaccggaagtatgtggcagaagaattagtcaaaaaaattttttaatccattgaaattaaagaaaaatgagtaaaaagttgctgtttgcagattatacaattttctatttaaaaaactaagcagtatattaaagcctgtctaataaatgcactcagtaaattagcaaaatataaaagtaacatagaagtatatgtatggtttctttcacttaaaacaaactatctgataaaatacagaaagaggctgggtgcggtggctcatggctgcaataccagcattttgggaggccgaggaaggtggatcatctgatgtcaggagtttgagacaagcgtggccaaaaaggtgaaaccctgtctctactaaaaatataaaaattagctggatgttgtggtgggcaccggcaatctctgctaattggtaggctgaggcaagagaattgcttgaaaccaggaggtggaggttgcagtgagcccagattgtgccactgcattccagcctgggtgacagttggagactccatctcaaaaggaaaaaaaaaaaaaaatagaggaagaaaaaaatcttatttactataacattaaataataaatttctgagaaaaatattaaccaaggaggtaaaaagtctttacaataaaaaaacaaaattagagaagatccaaataaattttaaaatattttatgtctatggattgaaagaataaatattaaagcaccatgttatccaaagtgatctatagattgaagaaacttcttatctaaattgcagttgtattttttcacagtaatggaaaatacaattctaaaatttacatgaaattaaaataaactttgaatagccaaagcaatcatgaggaaaaggaacaaggcagaaggatatcatacttataatttcaaattatatttcaagactatatagtaatgagtggactgtgcagaaaaatgaacagaaaaattcaacagaaataactactctcacacatttcaaatctgatgcgaaaaaaaccttaaaaaatagttttagtttcttaaaatcatgcatatatttgtgagtcccaaaaacaatgaaaaagaagccagattgtgcagtctcttatatgtcatgaagaggaatttggctttcaaatttggcttatatgtcatgaagaggaatttggctttcactcaccccatcgttcctaaccttacaccattcttagcaaaattccatatgatcatcaatggtttacaatgatagatttgaaggatgccttctgggcataccccttgtctgatgatagctgagatatatttgcttttgagtggtaagacccctatttggggcagagacaacaatattgatggacagtcttgccccagggtttcacagactcccccaacctctttgttcaggtcccagaacaagtactagaaaaagtcacagtccctaaacaaatatgtctgcttcagtatgtggatgatcttcttatatctggtaaagacataaaagaggtaggtgacttctctacacacattctcaatcacttgcagtgtgaggggttgctggtctcaaaagggaaaattcagtatgtagaacctgaagctaaatacttaggctacctaattagtgcaggtaaatgaaaaacaggacctgaaagagaattgtttccctacccttgcctcaaactaaacaagaactcaggaaatttttaggactaattggatattgtcatttatggatttgactcatatgcatgaaagagtaaacttctatatgagaaacttgcccagtggaaggctgataatttcttgtggacttcccaagaaatccagcaaattgaggaattgaaagggacactcatagccaccccgttctagctctaccctccctagaaaagccatttcaccttttcattaatgtaaataatggggtagccctaggaatgctaacccaagaacatggaggctgccaacagcccgtggccttcttgtcaaaggtcttagacccactcactcataggtggccccagggtatccaatccattgcagctacagcagtattagtcaaagaaagtaggaaggtaacctttggaggaaagttaacagtaagcctgccccaccaagttagaactatattaaatcagaaagcagggaggtggatcactgactcaataattttaaaatatgaggctattttactggaaaaagatgatttaatattaattgagaatatcatacctagatttagactaatagaaaatattagtctactactactgataattcacttaatccagcaagatttttaacagaggatccaaacttaaaacgagagcatgtatgtttagatctgattgactaccatacaaaagttcgaccagacttaggagaaactcccttcaagacaggttggcacttattcatagatgggtcttcccaggtgattgagaggaaaagacataacaggtattcagtgattgatggagagacgcttgaagaagtagaatcaggaaggctgcctaatgattggtctgcccaaacatgtgaactgtttgcactcagccaagctttaggacatttacaaagccaagggtatactgactgtaagtatgcctttgccaggaaggaactatctatactgactgtaagtatgcctttggggtggcacacacatttgggaaaatttggatgaagaggttcttatcaatagtagaggccaagatttagttcatagctaattgcttgtgtcctcaacaatctccaattgccagaagagatagctatcgtgcatgtcgcagggcaccaaagggactttggtgtctgtagttctctaatatcacatccctatataaattccactgtgcagtgtccaggcaatgccattcctccagagagaattctatggccacatctctaaattgcaatggttcctgaaacacacacacacacacacacacacacacacacacacacacacacacatttttaccaagttgccattggtggaatttttaatttgatttaaggtgaaatgagagagtaaagggaagtgattctgacttacaggactaaaattatccaataaaataattttcaacacagaaatattctctaatatattctctaactctaagaaaaaaagaggagcataacatccacaacatcatttcatatatttttccatataataaagtataaaattaagggcatgaacatgaacatgtacatttttgagtgctatatttacatcatacagaatgagttgtgaatatttttccgatggaaaagacatgttgagttagaaggtatctctcaaattttgttttgagatggaatttcaatctagttgcctaggctgaagtgcagtgatgtgatcttggctcaccacaacctctgcctcccgggttcaagcaaatctcctgccacagcctcccgagtagctgagattacaggcatgcaccaacatccctggataattttgtatttttagtagagatggggttttctctatgttggccaggctggtcttgatttcccgaactcacgtgatctgcccgcctcagcctcccaaagtgctgggattacaggcatgagccactgcacttggctgatttttttaatttctaagaagctcaccagtaatgccaatgtttttggcccaagaaggatattttgtcaaacatccagtaagtggaagagcctgtgtttttcccagattttttagcctgtaagcaaagataaaagccttcattttccaaagagagatatgtagaaaaaaataagaaaaaaggacagctgccagattaaatgtgatggtttatgcacatcagctgcataaacatacttaataatgaagagaaaaataattaaccctatggtgaaaaaaatctgtcagagagctaattcaccaagtgaatcattaaccattaactgcacgaggacaaatttttacgatgtgctaatgcacacaggagaacacagaatcactgttgaaatatacttccccaaaaaactaaattacagtctgaatttaaccataaagaaacatgagttttatgcaaacttcaacatccagataactcctatgttctgtaatttttactagtaattttaaatagggttcatttagcaccctagaaaacaagtatctcctgataagttttttcagaactttctgggtaataaatgccatcccattttaatgagcattttcttaatcctgttctgcatagagctaatggaacacacagatggagcctcaacattacatgttctccatctttactaaggaccacacttttccccaatagaaatcttcagtatccacatctttccatgttcaatagccacaaaaggaacatttttaatattgcagatcataaatccttgctgagaatcctgcgtgacatataagaagctatgatgtagagaatgcagagatggctctggaatataggaaagaaatatttttcagagacccttgactatcataagaattttaacaagtagttaaatcaaacttattagggaggaaaaatacaagtagaaaaataaaggtttgcaagtactaaacgcatggcagtccaggaggcagagtggacacaggtcttcatctgacacaggtttacctgaagaaaagcctttttttttctttttccccttctctggaattccttctcagatgagattttctggacaaattaaacctgcatctgaaggatatgcttttaaaggtgtttacctgctagcatgacatcaactagcagaaaaagacagaaaaagtccacccatttctgtcctttaaaacagaagaggttcaggaaaaatgagatgctccatgaagatgaaagtataagtttctcctttcctgtcctcaggtgccctcccctgccacagacactagcaatttctgctaccttaatggaaatatgcaccacactgacctgtccctactaaacccaaacagaactggccctgtgaccaccctttagtccaaaggtggagcttaactctcatgaatgtattttgagggcctcatacctgattctggcctaaccttagagtcacatgaggcccttcattaaaacgtgatagatgcttccaccgagaatgataaacagaagctgtggggagggcacaagagatttctgcaaattggccatttgatcctaatgggaagcctgggctgataaccactaagttaagcattgcctctcaagctttaatgagattataaatcacctggtaattttggccccacttaatgtaatgtgattctgcaggtttgaaaagggtccaagagtgagtgttttaaacaagtcccctgtcaatgcagttgtttctcccccttggagaattattaacattagagaaagcaggcacagcacagggtcccttacacttagcactcttgtcaccaccaaatacttctggtacaaataaggacaacccatctccctcctaaagttttatagtctttgctggctctttagagtttacagaggaaacaaaagtcagcaatgtctgaataagtctgtatttaaaaaacaacatgtaaacatgtactaatgcaatgtttattaagcaggtactatgtgctcaagggtaagatacagagcactgtgctggtcatccctcattatgtaatttaattctcataacaccctgggagctggtactaagggtttaataatttttaggatttagataaagggcccagcatttttatttcttctgtttctctgtcatcaaattttttaaaaaactgtaaatagtaaagctaaatataggcagatgaaagagatatagaaaggaagagtttaatgtagctcagagaaaattttattctgtttatattcacttttttgtgacttgtggagcaactactggatctgcaggaatagaaaacaagttgctaaagagaatgtctctgcaaccactggttttaatggaaaatttaaaaactggccgggtgcagtggctcacgcctgtaatcccagcactttgggaggccaaggcaggtggatcacctgaggtcgggagttcaagaccagcctgaccaacatggagaaaccccatctctactaaaaatacaaaattagccaggcatggtggtgcatgcctgtaatcccagctactcaagaggctgaggcaggagaatcgctggaacctgggaggtggaggatgcagtgagccgagatcgtgccactgcactccaacctgggcaacaagagcaaaacttcatctcaagaaataaataaataaataagtaaaatttaaaaactaaggctctacaatatatactttatttttcccatttatctgcttttgggtttcaggaaattgtgagtagcagctctagaactgctgcaggattcatcagccaaaattctgataacttctaatcagttctgtgaggcaagactccagggcagggtcagacctaaataaggcctccaaaaagggtgaatctgaacaggtctgggacaaggtgaggaccctatagaattctgttctctatgccactggagtactaacaattttgttttttctaagcttgcctgaaagaagcctaaaatcccagagtttctgttattttcattttttctagccactaccctgtcaactgtatactatatactaatatgcaaattaaacaaatctcttcaggttttgtagtgtaattttattagaaaataaatactgtgcacttaacaacataaaagaaatagattttatatggccgggtgctgtggctcatgcccataatcccagcactttgggtggccgaggcgggtggaacacgaggtcaggagtttgagaccagcctgataaaggtggtgaaaccacgtctccactaaaaatacaaaaattaaccaggtgcagtggcaggcccctgtaatcctagctacttgagggactgaggcaggagaatcacttgaacctgggtggcagaggttgcagtgagccaaggttgcaccactgcactccagccttggtgacagagtaagactccatctcaaaaataaaaaagaaattataataacaatttttctgttcataaatatcccttcaggtgtagacatgagaagttacaacaatataaagaaatagcctaaataaagcctaagattttgggcatatctatttattgtaccaaccatatgatgcataattcaattatttatctgggtgctagtctagactaaaagtttctagatggtaggaaccatgactgcttcatggatttttttaaatggccatatgaaatggaagcaactagtttatctatttgggtctccggattttctccttttgtatcatccaagtaccaggaaaccggagaaactctcatctgggtaccaaccaaagacacctcttgtatgaggggatgaactaacaggatgactcatttctctcacactgagacagaaggagaattaaccattcttgtcagcctgacataattccgctcaggacatcctcaaatgcctcaaaggcacctagatgattgtgagagaattctcggtgaccaggggctaatgtcccaatgataaaccaggctggagagactcaggctgattctaaatagaaaatggaactgtcctggtggagctccagaacctagatcacctattctaatttgctagctccatggtataaaatatttttttggaacttcttaaattttttcaactcttggacatctgaattttgcatactgtatgcacttgaaagaatgtttatgggtgaaaatgcagaagagggaaatatgttataaaaaatccatgaatgaacaatacctatgcaacagaatagagagcccagaaataatgccaccctcctacaacgattagatttttgccaaagctgacaagaggaatgtgggaagaattctctatttcataaatggagttggaataactacctagcactatgcagaagactgaaactggacctcttcattacaccatatacaaaactcaactcaaaataaattaaagacttaaatgtaaaatttaaaattataagacaccctgcaagataacctaagaaataccattctagacatagaaactgggaaaaccttcatgatgagtctatcaaaagcaattgccacaaaagcaaaaatggacaaaagggacctatttaaactaaagagcttcttcacagcaaaggaaactatcaacagagtaaacagacaacatacagaataaagaaaatatttgcaaacattgcctctgacagaggactaatatccagaatttattaagagctcaaacaagtttacaagaaaaaaaacaaataacctcattaaaagtagaaaagaaaaacatgaacatattcttttcaaaagaagacaaatgtgcagttaacaagcatgtgaaaaaaatgctcattgctaattattagagaaattaaaagaaaaaccacaatgagataccgcatcacacccatcagaatggctatttttaaaaagtcaaaaaataatagatgctggcaaggttgcagagaaaagggaatgcttatactctgctggtgagagtgtaaattagttcaacaactgtaaaaagcagtgtggcgattcctcacagaactagaaacagaattatcatttgacccagcaacctcataattgggtatatacccaaagaaatataaattattatattacaaagacacatctatatgcatgttcactgtagcactattcacaatagcaaagacacggacaggcactaaatgcctaccaatgatagactagataaagaaaatatggtatggtcagatgttgtggctcatgcctataatcccagcactttgggaggccatggcaggtgggttgcctgagcttagaagtttgagaccagcctgggcaacaagacaaaatcttgtctccccggaaaaaaaaaatatataaaattgcccagttatggtaatgcacgtatgtagtcccagctacaagggaagatgaggtaggagagaattgcttgagcctgggagattgtggctaaagtaagccaatatcatgccctggcactgtagcctaggcaataagcctgtctccaaaaataaaataaaataaaagatttagtaaaaacaaaatatggtatataaacattacaaaatactgggtagctatttaaaaaaaatcatgtcctttgcaataacatagatgaatctggagaccattattcttagaaaatgaatgcagaggctggacatggtggctcatgcctgtaatgctaacactttgggaggccgaggtgggcgaaccacctgaggttgggagtttgagactagcctgaccaacatggattaaccctgtctctactaaaaatacaaaattagctaggcatggtggtgcctgcctgtaaccccagctactggggaggctgaggcaggagaaccgcttgaacccaggatacgaatgttttgatgagccaagatgttaccatggctctccagcctggacaacaagagcaaaactccctttcaaaacaaacaaacaaaaaaacaacaaaaaaagaaaactaatgcggaaacacaaaaccaaatgcatgttataatttataaataagagctaagaagtaagaacacagaacacaaagagaagaacagacacaggcctagttgaggctggagggtagaaggactcagaagatcagaaaacataattgtttggtgctatgggtagtacctcagtgacaaaataatcggcacaccaaatccccatgacataattttagctgtataacaaacccacatgtgtacccggaaccaaaaataaaagctaaaagaaaaacaaatcccctctccctctccctccgcctccccctccctctccctctccgtctccgtctccctctccccagggtctccctctccctctctttccacggtctccctctgatgccgagccgaagctggactgtactgctgccatctcagctcactgcagcctccctgcctgattctcctgcctcagcctgccgagtgcctgtgattgcaggcgcgcgccgccacgcctgactggttttcgtgtttttttggtggagacggggtttcgctgtgttggccgggccggtctccagcccctaaccgcgagtgatccgccagcctcggcctcccgaggtgccgggattgcagacggagtctggttcactcagtgctcaatggtgcccaggctggagtgcagtggcgtgatcttggctcgctacaacctccacctcccagccgcctgccttggcttcccaaaatgccgagattgcagcctctgcccggtcgccaccccatctgggaagtgaggagcgtctctgcctggccgcccatcatctgggatgtgaggagcccttctgcctggctgcccagtctggaaagtgaggagcgtctctgcctggccaccatcccatctaggaagtgaggagcgcctcttcccggccgccatcacatctgggaagtgaggagcgtctctgcctggccacccatcgtctgagatgtggggagcgcctctgccccaccgccctgtctgggaagtgaggagcgtctccgcccggcagccaccccgtccgggagggaggtggggggggtcagccccccgcccggccagccgccccatccgggagggaggtgggggtcagccccccgcccggccagccgccccgtccgggagggaggtggggggggtcagcccccagcccggccagccaccccgtccgggaggtgaggggcgcctctgccaggccaccaccccgtctgggaggtgtacccaacagctcattgagaacgggccatgatgacaatggcggttttgtggaatagaaaggggggaaaggtgaggaaaagattgagaaatcggatggttgccgtgtctgtgtagaaagaagtatacatgggagacttcattttgatctgtactaagaaaaattcttctgccttgggattctgttgatctcttgaccttacccccaaccctgtgctctctgaaacatgtgctgtgtccactcagggttaaatggattaagggtggtgcaagatgtgctttgttaaacagatgcttgaaggcagcatgctcgttaagagtcatcaccactccctaatctcaagtacccagggacacaaacactgcggaaggccgcagggtcctctgcctaggaaaaccagagacctttgttcacttgtttatctgctgaccttccctccactattgtcctatgaccctgccaaatccccctctgcgagaaacacccaagaatgatcaataaaaaaaataaattaaaaaaaaaaagaaaaaaaatccccaggtgagagagagtgcaatgtcagtgaatggacagatttttgctacagatagttgaccaggtggggctgtactctgatttatttctgtgtgcatgcaggcagatgagattatgaaaaggagggccagaaccctaggctggtggagaaaacaggttgctgctgcagattcgatatccggggatgggaatatgcaaggaaacttgtagatacttttggctttttggctagaagtgcttggaccaaaaatgtcatggtgaagtcactgagggtggtgcctagtcctgggaggagtgtggacatgtcaatgtctagtgtgtgtgtttgggagtatgtgggaatcctgtggtggcagctgcaagaaaaggggatgtgtcatcagagctcctttcctgtaagttttcagtcctctgtcaccctgggagaagacctggaatcacaggacaatgggcagtgtgacaatctgtgtacaggagagcagaatctcccattcccaaacacccagagttttattccaggccaggcctccatgatatcttctttctggcaccaaatctgtagcatttgctgaacatcaaacaattctccaacaccaacttattgtataacatttgatttctaacactacccagagtcagcacagaccctgattcagggctcggtcccacaacattgttctcactgcagatgccagtcataaatcccatgggcccatctatggttctgagctactgtttaaaaactggggactcccataacttccctgaagctcagtaatttggtagagctactcacagaactcagcaaaacactgtagttatgcttactggtttaatatataagatgcagcccaggaaaagccaagtggaagaaatgcatagaacaaagaaaagagatgaggaaagatgaaacacatagataattatgaaaaatatttgtgattaataaaattctccttcctttgtgtgcttcaggaacagtttatggaaagaaacactcttcccgttatgattaagatgatgctcccttttcttgcctatcacacagccagacatacactctgcacattttctcctttttctcattaaaaaaaaaacaaaaaaccagctgaatttgccttcagcagtcaaaatcaattatgattttttttttttttgagatggagtgtcactctgtcacccaggctggagtgtagtggggccatctcggctcacttcagctttcacctccagggctcaagcaattttcctacctcagcctcccaagtatctgggattacaggcacctgccacaacgcccagctaatttttgtatttttagtagacagggtttcaccatgttggccaggctggtcttgaactcctgacctctggtgatccgcctgcctcagcctcccaaagtgctgggattgcagacttgagccaccacacccagcctaaaataaaatatttcttaatcaaattttacttaagtttatcttctctcaggctcctgaaattcaagctaccctcagtctgagtcaacatacaaccccattttatgtccctcctaagaacatgctgatttcagggtaagccattctctgatctaaaatctgactttttcaccctccatttgctgttcctctcccacctcctttctaatcttgtttgctcttccctagaaaagaaagcccttttctgcctatatttttgcaagccataaagatattatagttatttggtgcttccttttgttgcaatacttttttggaattggttttttacctgcctcttgagaatatgcctttaagggtgtcagtaccacatgtttacctgcaagcatgacatcaactggcagaaaagacagaaaaagtccatccatttctgtcccttaaagcagaaggtatttgggaacaatgtgctgctccataaagataaaaatatgtttcttcttccctgtcctcaggtgccctcccctgccacagacaccagcaatttctgctacagaacctgcagagaaaaagagaagaaattaaaatgctgggccctttttctaaatcctggaaattagtattaaatccttagtaccagctcccagggtgttatgaggattaaattatataatgtattatgcccagcagagttctctgtatcacaatcttgagcacatagtacctgcttcatacagtaatacaaatatacaccactctgacctgtccataccaagccaaaacagaacaggccctgtggctaccctttagtccaaaagtggaacttaattctcatgaatatattttgaaggcctcatacctgattctggcctcaccttagagtcacatgaggcccttcattaaaacaacatggatgttttcaaccagaataataaacagaagctgtggtgagggtacaagagatttctgcatattggccatgtgatcctaatgagaagcctgggctgataaccactaagctaagcattgcctctcaagctttaatgagcttataattcacttggtaattctggccacactttaagtaatgtgattctgcaggtttgaaaagggtctgtgaatcagtgttttaaacaagtcccctgtcaatgctgatgttactcctccttggctcattattaacattagttagaaaagcaggcaaaccacagggtcccttacacttagcactgttgtcacaatcagataactctggtacaaataaggacaactcatctccatcctaaagttttatattctttgctggctctttaaagtttacagaagaaacagaaggtaattaccaggatttagaaaaagagccaagcattttaatttcttgtttttctgtcatcaaaaatttttaaaaattgtatagaataaaagctaagtatagacagatgaatgagacataaaaaggaagaggttagtttagagaaaattttattctgtttgtatttacttttttttgacttacggagcaactactggatctgcgggaataagaaacaagttgctaaatagaatgtctctgcatccaatggttttcatagaaaattaaaaaacggctgggtgcggtggctcatgcttgtaatcccagcactttgggaggcagaggcgggcggatcacgaggtcaggagatcgagaccatcctggctaacgtggtgaaaccccatctctactaaaaatacaaaaaattagctgggcgtggtggcgagcgcctgtagtcccagctactcggaggttgaggcaggagaatggcatgaacccgggaggcagagcttgcagtgagccgagatcgcgccactgcactccagcctgggcaacggagtgagactccgtctcaaaaaaaaaaaaaaaaaaaaagaaaatttaaaaatgaagaccctcaaatacatactttatttttttgtatttatctgcttttggatttcaggaaattgtgagcagcagctctagaaatactgcaggattcaccagccaaaactgatctctgccaatcagttctgtgaggcaagactccagggtaggtctggacctacataaagcctccaaaaaaggtgaatctgaacaggtctggggcagagtgaggatcctttgtagaattctgttctctatgccactgggatacttccagttttgtttttctaagcctacctaaaagaaacttaaatcccagagtttctgtaattttaatattttctagccacggccctgtcaactttatactatatactaatatgcaatttaaagaaatcccttcaggtttcctagggtaattttattggaaaataaatatgtacagttagcaaggtaaaagaaatagaaactatacggctgggtgcagtggctaagtcccacaattccagcactttgaaaggctgaggtgggtggatcatgagggcaggagttcaagaccagcctgaccaagatggtgaaaccttgcctctactaaaaatacaaaaattagctgggcatcgtggctgtggccagtaatctcagctacttgggaggctgaggcaggagaatggcttgaacccgagtggcagaaattacagtaagccaagatcgtgccactgcactccagcctggggaactgagattctgtctaaaaaaaaaacaacaaaactataataattgttcggttcataaatatattcaggtgtagatatcagaagtcacaacagcataaagtggcataaataaagcccaagactttggacacatctatatattccaccaaccatatgatgcataattcaattattcatgaagttgctagtctagactaaaagtttctggattgtaggaacaatgactgcttcatgtatttttttaatggccatataaaatggaagtaatgagtttatctatttgggtctccaggtctccttatttatcatccaagtaccagaaaactggataaactctcatctgagtaccaaccaaagatacctcttgtatgagaggatgaacaaaaacacaggatgactgatttctcttacaccgagacagaagcagaattaatcactcttgtcaacctgacacaactctgctctggatattcccaaatgcctcaaagacacctaggtgattgtgagagaattcccagtgaccatgggctgatgtctcaataagccaggctggagagactcaatgataagccaggctggagagactcaatgataagccaggctggagagactcaggctgactctaagtagaaaatggaactgccttggtggagctcaagaacctggatcacccattctgatttgctagcatttgggtaagagaaagaatgaaaatattctactccagtatcacattttacaggtaaatatagttgtgcacatggctctggctattttgtggacttgatgtctcactcctaagatgtttatttacacttacagattctaccatcagattctatttcctcctggacactcttacagtctgacccttttttgtaaaccccaggcagaagccataccttatctgcagattctaggtaggacccacctggttctgcatcctttggtgttacagcaagtggagtacaatcagagaagagatcccctaatagaggctgctctagcactttctaagtattaagcctacatgaaaaaaaaaaaaaagctgacacaacatgaatgtaagtagacagtttatttgggtgaagtttaaggattataacctgggagcaaagactgaagttgcctagaatctacactttcattaacagcagttgcaagaggagttgtgaagacaaaaacaaagggacagagagtgggctgatagagttgtcagaaatttttatttaaagaagtaacattggttattgattggacatatatcattatggtttagggtatgagatacagtgtccaatgtggtattatcagtttaatatacatctacttgtggcaatagtgaacagtttcaagagatgaatacatatttcaaaggaggagaaaggcgtaactgcactttcatttcaatgtctgagtttgataaccaaaaggacttgcatttttagataaaaattttctatttcccaaatctcaagacctagatacaaaatgtagagctgcagatttagggcccgaatggctggagtagcagcaggtgttacctgcacatttgtgaacattttaccaagagaaaaaaggggaaagtgaagattctcatgtctgaatgtgtactcaatgaaaacgttactctgattaggtttgtgggccccatggtctctgaatcagtttaaggtctgaagatacaagagtcattgagataaaactattgattgttgccctgtgaagttggtagaaatttggtttagtctctctagaagtgactgtagaggactatagataccaaataggcagaaacacagttctgcttgcatatttaggggacagcatgcactttgttgcacaagtgtgagttgactggaagtctgagagggaaagtcccctctagagtaaattccagttggcaccttatgtgtttatatcatgtctggtaattatagacagtgtttggaaataacaaaagaatgttctccagccccagaaaaactccacaatagaacagaaagaaaactgttttatgtgacatgcatcatagtcaatctgcttaagagactgcagagacagaaagatggtcaccaaaattagtccacaagtagaatttccagaaccatgtcatacatagttcatcctaaattcacatggagattgaagaggccatctgtatatgctaattgtttatattcaataacaaaaaaacttttcacaccttcataacaggaggtagtttagcagcttgaagccaggtacttgctgaaggtaggttttcactctgctacaaaaatggttgaaaagcattctatccttttggctatttacattttacagcagtggctctgtgttccatggcattgggctacagcactttcttgctttttcctggttgctagtgtcctcttgacctctctcatctgccactgagggacagccttgagcacagctcagtttatgtgaaccacatttcccacagcagcactctagtgtcacatcagagaggaaagcctgagctgcaggagagcctgcaggccttgtgagtagaattgcactttcacaataatgggaatgtgaccagtgtttcagcccgtttttaattatcatggtgacatggaaaaaaaatcggatgaatttccagcatgagtccagatagagatatctacaaaagttctcactgtgacagcctacctcattcagacaccatgggatactaatagggcttctgaaacagacacccaaagtattggagagaaaaacagatctccatctgagcaagataattttgagagaaaaaagttaaaaagatcttgagaaaaaagatcttgagaaaaagctcagtttagatataagattgatcaagtcagccagaaaatagtcccctaaaagcaatttctctctaaccacccaaagtgcacaattactctcagcatgagaaacatgagcattatgaagaaagggggcagaatttcagaagaattttataaagctttttttcccatctctgctgctctctcatctcctagtcattgaatgggggttctatattgaaatatatctgacaacttccaacaacactttttgatgcagaaatagaatctgactgtgttcacattgtggagtatattagaacttccaacatagttaactgaagagctatcatggtttttgggtggccacatcaactgtctttatttcatttgtaatagcagcattccaattgagtgaaataaaagatactaaaattgtgtttacttataattatccctattgaataaagtaataaacatgtcagactagtattgactgtaacaatttggtagtaaattttttggggtattagattaaatatctaagtataaataattttaataaactagtagtaatgtatatggcagttaaaaagtttaactatacttcagttaaaatagtttatatttcaaaagtgtaaataacaatattaaaataaccatttaagtgattcattcaaagtaagtattgtggctttatattcatactattgtaaaaaatactgtttatggctcatgcctataatcccagcactttgggagactgaggtgtgtggatcacctgaggtcaagagttcacaatcaagctggccaacacggtgataccccatctctactaaaaatacaaaaacttagccaggcatggtggggtgtgcctgtaatcccagctactcaggaggctgaggcaggagaaatcacttgagcctgggtcccagtggttgcagtgagcagaacacgcccctacactccagcctgggcaagagtgagactctgtctcaaagaaaaattaaaaaaaaagaaaaagaaaactgtttaatgtatatgaatgtattgttatgtgtagtgtctgcaaacactacacataactatgctaattgttctgaagtcatcaatagaaagccaagtacaactacagactctactgttcagtttatgcactgaactctttttgtttttgctgtgtaagtacttcagcctgcaaatgttggataattaccttggataataaagttactttcaaagaaacttagtatcttttagcgtttctcattccatattgctaaatttaatcctatgtttctgctaagcttctgtgtgctcttaaaatgagcttttatctaaacacatttgtgtttactttaaaggactaaaaatgggccaggcatggtggttcatgcctgtaatcccagcactttgggaggctgaggcgggcagatcacttgagtttgggaatttgagaccagcctgaggaatatggagaaaccccgtttctactaaaaaaacaaaattagttgggtatggtggcacgtgactgtaatcccaactactcgggaggctgaggccagagaatcccttgaacctgggaggtggaggttttggtgagtcaagatcatgccattgcactccagcctgggcaacaaaactgaaactccatccaaaaaaaaaaaaagtcctaaaaaggagagaaacaaactttttaaaattagaaataaaccaataaatcagatgtactagaaaagataatctaaagtaaaaaaaaaaaaaaaaaaaaagacaaagtttatttaactgttaatatggtttacagatatttcaagaaagcagagaaaaatatctacacataatctaaatcccttaaggaaaaagagaataagaaaaatttttttggaactttttaaaaagtctttgaactcttggtaatctaagttttgcaaacaggatgcacttgaaagaatgttagcctaggtgtggtggctaacacctgtaatcccagcactttgggaggttgaggcaagcagatcacctgaggttgggagttggagaccagcctgaccagcaaggagaaaccctgtctctactaaaaatacaaaattggctgggcatgatagcatatgcctgtaatctcaactacatgggaggctgaggcaggagaattgcttcaactcaggaggtggaggttgtggtgagccaagatcatgccattgcacttcagcctggcaatagcgaaactccctctccaaaaaaaaaaaaaaaaaatgtttatggggggaaaagcagaagagagaaagatgttataaaaaattcatgtgcacaagaccaatgcaacagaacagagagcccagaaataatgccaccctcttgcaaccatcagatttttgacaaagctgacaaaagaaatgtggggaaaattctctatttaataaatggtgccggaataactaactagtaatatgtagaacacttaaactgaaccccttaattacaccacatacaaaaatcaactcaagaaaaattaaagacttaaatgtaaaacataaaattataagaaaccctgcaagataacataaaagctaccattctagacatagaaacctgcaaacacttcatgatgaagctaccaaaagcaattgcaacaaaagcaaaagctgacaaatgggacctatttaaactaaagagattcttcacagcaaaggaaactatcaacagagtaagcagacaacctacagaataaaagaaaatatttgcaaactttgcctctgacaaaggtctaatatccagaattaatgagaacttaaacaagtttacaagaaaaaaccaaacctcattaaaaagtgggcaaaaaacatgaacagatgcttttcaaaggaagacatacatgtggctaacaagcatatgaaaaacaaagctcaatggtaatcattaaagaaattaaaaagaagccaggcacggtgtctcacacctgtaatcccagcacattgggaggcttaagcaggcagatcacaaggtgaggagttcaagaccagcctgtccaatatggtgaaaccttgtctctaataaaaaaacaaaaattagcctggcatggtggtgggcacctgtagtcccagctagtcaggaggctgatagaggagaatcacttaaacctgggaggtggaggttgcaatgagctgagatcgtgccactgctctccagcctgggtgacagagccaggctccatctcaaaaaaataaacaaataaattaaaagaaaaaccacaatgagataccacttcacatcagtcagaatggctattttaaaaaagtcaaaaaataacagatgctaccaaggttgcagagaaaagagaatgcttatactctgctggtgggagtgtaaattagtttaactgtaaaaagcagtgtggcaattcctcacagaactgaaaacagaattatcatttgactcaggaacctgataattgggtatataccaaaagaaatataaattattataaagacgcatccatatgcatgctatgcatgttcattgcagcactattcacagtagcaaagacatggacaggacctaaatgcccatcaataaagaaaatatggtatggtcagaagcggtggctcatgccttcaatcctagagctttggaaggccaaggcaggtggactgcctgagcttagaagtttgaaaccagcctgaaaaaaatagcaaaatcttgtctacatggaaaatacaaaaagaaaaagtggccagccatagtaacgcacacgtgtagtcccagctacttgagaagatgaggtaagggagaattgcttgagcctgggaggctgagactaaagtaagccaaaatcacaccatggtaatctagcctgggcaataagtgagaccctgcatccaaagataaaataaaataaaagatgtagtaaaaaacaaaatatggcacataatcatggaatactccatggccattaaaaaaaatcatgtcctctgcaataacatcaatgaaacccattaaaaaaaatcagctctgatcttagttttttcttgccttctgctagcttttgaatgtgtttgctcttgcgtctctagttcttttaattgtgatgttagggtgtcaattttagatctttcctgctttctcttgtggacatttagtgctatatatttccctctacatactgctttaaatgtgtcccagagattctggttatgttctgtctttgttctcattggtttcaaagaacatctttatttctgccttcatttcattatgtacccagtagtcattcaggagcaggttgttcagtttccatgtagttgagcagttttgagtgagtttcttaatcctgagttctagtttgattgcactgtggtctgagagatagtttgttatactttctgttcttttacacttgctgaggagtgctttacttccaattatgtggtcaattttggagtaagtgcaatgtggtgctgagaatgtatattctgttgattttgggtggagagttctgtagatgtctattaggtctggctggtgcagagctgagttcaattcctggatatccttgttaactttctgtctcattgatctgtctaatgttgacagtggggtgttaaagtctcccattatcattgtgtgcgagtcttagtctctttgtaggtctctaagggctttctttattaatctgggtgctcctgtattgggtgcatatatatttagtatagttagctcttcttgttgaattgatgcctttaccattatgtcatggccttctttgtcttttatgatctttgttggtttaaagtcttgtttttctcagagactaggattgcaacccctgctttttttttttgttttccatttgcttcagagaccttcctccgtccctttattttcagcctatgtgtgtctctgcacatgagatggatctcctgaatacagcacactggtgggtcttgactctttttttttttttgagatgggtctctgttgcccaggctggagtacagaggcatgatcttggctcactgcaagctctgcctcccaggttcatgccattctcctgcctcagcctcccaagtgcctgggactacaggtgcctgccaccatgcctggctaattttttgtatttttactagagatggggtttcactgtgttagccaggatagtctcgatctcctgacctcgtgatctgcccacttcagcctcacaaagtggtgggattacaggtgtgagccactgcacctgccagggtctgggccctttatccaatttgccagtctgtgtcttttaattggagcatttagcccatttacatttaaggttaatattgttatgtgtgaatttggtcctgtcattatgttagctagttattttacttgttagttgatgcagtttcttcctaacattgatggtgtttacgatttggcatgtttttgcagtgactggtaccagttgttcctctccatgtttagtgcttccttcaggagctcttgtaaggcaggcctggtggtgacaaaatctctcaggatttgtttgtccgtaaaggattttatttctccttcactgatgaagcttaggttggctggatatgaaattctgggttgaaaattcttttctttaagaatgttgaatattggcccccactctcttctagcttgtagagtttctgccgagagatccactgttagtctgatgggcttccctttgtgggtaacccgacctttctctctggctgcccttaacattttttccttcatttcaactttggtgaatctgacaattatgtgtcttggagttgctcttctcgaagagtatctttgtggcgttctctgtatttcctgaatttgaatgtcggcctgccttgctaggttggggaagttctcctggataatatcctgcagagtgttttccaacttggttctattctccccatcactttcaggtacaccaatcagacgtagatttggtcttttcacatagtcccatatttcttggaggctttgttcatttctttttattattttatctctaaacttctcttcttgcttcatttcattcattttaacaatcactgatactttttcttcctgttgatcacattggatactcaagcttctgcattcatcacgtagtttttgggccatggttttcagctctatcaggtcatttaaggtcttctctacactgtctattatagttagccattcatctaatcttttttcaaggtttccagcttctttatgatggattcgaacatcctcctttagcttggagaagtttgtttttactgattgtctgaagaactgaaggagagagagagacacaaaagaaccttcaaaaaaaatcaatgaatccaggagctggtttcttgaaaagatcaacaaaagtaatagactgctagccaaagtaataagaaaagagagaagaatcaaatagacgcaataaaaaatgataaaggggatatcaccactgatcccacagaaatacaaactaccatcagagaatgaatactataaacatctctacacaaataaactagaaaatctagaagaaatggataaattcctggacacataccccctcccaagactaaacaaggaagaagttgaatccctgaatagaccaataacaggctctgaaactgaggatataattaatagcccaccaaccaaaaaaagtccaggaccagacagattcacagctgaattctaccagaggtacaaagaggagctggtaccattccttctgaaactatttcaatcaatagagaaagaaggaatcctcccaaactcattttatgaggccagcatcatcctgattccaaagcctggcagagacacaacaaaaaaagagaattttagaccaatatccctcatgaacattgatgcaaaaatcctcaataaaatattggcaaactgaatccagcagcgcatcaaaaagcttatccaccatgatcaagttggctttatccctgggatgcaaggctggttcaacatacgcaaatcaataaacgtaatccatcatgtaaacagaaccaaagacaaaaaccacatgattatcaatagatgcagaaaaggcctttgacaaaattcaacagcacttcatgctaaaaactctcaaactaggtattgatgggacgtatctcaaaataataagagctacaaaccactgctcaatgaaataaaagaggacacaaacaaatggaagaacattccatgcttatggataggaagaatcaatatcatgaaaatggccatactcctcaaggtaatttatagattcaatgccatccccatcaagctaccaatgactttcttcacagaattggaaaaaactactttaaagttcatatggaaccaaaacagagcccatattgccaagacaatcctaagccaaaagaacaaagctggaggcatcaccatatttgacttcaaactatactacaaggctacagtaatcaaaacagcctggtgttggtaccaaaagagatatagaccaatggaacagaacagagccctcagaaataataccacacatctacaactatctgatctttgacaaacctgacaaaaacaagaaatggggaaaggattcccgatttaataaatggtgctgggaaaactagatagccatatgtagaaagctggaactggatcccttccttacaccttatacaaaaattaattcaagatggattaaagacttaaatgttagacctaaaaccataaaaaccctagaagaaaatctaggcaataccattcaggacataggcatggacaaggacttcatgactaaaacaccaaaagcaatggcaacaaaagccaaaattgacaaatgggatctaattaaactcaagagcttctgcacagcaaaagaaactaccatcagagtgaacaggtaacctacagaatgggagaaaatttttacaatctacccatctgacaaagggctaatatccagaatctacagagaacttaaacagatttacaagaaaaaatcaaacaaccctaacaaaaagtcggcaaaggatatgaacagacacttctcaaaagaagacatttatgcagccaacagacacaagaaaaaatgctcatcatcactagccatcagagaaatgcaaatcaaaaccacaatgagataccatctcacaccagttagaatggctatcattaaaaagtcaggaaacaacaggtgctggagaggatgtggagaactaggaacacttttacactgtttgtgggactgtaaactagttcaaacattgtggaagacagtgtggtgattccccaaggatctagaactagaaataccatttgacccagccattccattactgagtatatacccaaaggattataaatcatgctgctataaagacacatgcacacgtatgtttattgtggcactattcacaatagcaaagacttggaaccaacccaagtgtccatcaatgatagacaggattaagaaaatgtggcacatatacactatgcagccataaaaaaggatgagttcgtgtcctttgtagggacatgaatgaagctagaaaccatcattctgagcaaactatcacaaggacagaaaaccacatgttctcactcataggtgggaattgaacaatgagaacacttggacacagggtggggaacatcacacaccccggcctgtcatgggtgtgtgatggagcagagagggatagaattaggatatacctcatatgaataatgagttaatgggtgcagcacaccaacatggcacatgtatacatatgtaacaaaccagcatgttgtgcacatgcacctagaacttaaagtataataataataataaaaaattaataagtaaaaaaaaaatgaggtctttgcaataacatcaaggcacggtggctcacgcctgtaatcccagcactttggaagaatgagatgggtggatcacctaaggttgggagtttcagaccatcctgaccaacatggagaaaccaaatctctactaaaaatacaaaattagccaggcgttgtggtgcgtacctgtaatcccagctactcggaaggctgaggcaggagaatcccttgaacctaagaggtggaagttgtggttagcggagatcacgctgttgcactcaagcctgggcaacaagagtgaaactctgtctcaaaaaacaaaaacaaaaacaaaaaacaaaccaaaccaaaaagaaaactaatgaagaaaaagaaaaccaaatgcttgttattatttataagaggtaaataataataacacatgaacacaaacaacagacactgaggactagtttagggtggaccctgcaaggactcagaggatcagaaaacatacctgtttggtgctatgggtagtacctcagggacaaaataatctgcacaccaaacccccgtgacacaattttagctgtataacaaacccacatgtgtaccccgaaacaaaaattaaagctaaaagaaaaaaaaaaatcccagggtgggagagtgcaatgtaggtgaaaggactgatttttgctacagatagtggtcccagtggggctgtactgatttatttctgtgtgcatgcatgcagatgagattatgaacaggtggtccagaaccctagtttggtagagaaaacaggttgctgcagcagatttacagtctgaggggatgtaccaggagacttgttttttggcaaaaaacacttggatcaaaaacgccatggtgaagttcctgaggggggtgcctagtcctgggaggagtgtggacacatcaatatctagtgtgtgtgtttgtgagtgggtgggaatcctgtggtagcagctgtgtgaaaagggggtctgtcatcagagctcctttcctctaagttttcaggcctctgtcacccttggagaagacctggaatcacaggacaatgggcagtgtgactgcctgtgtacaggagagcagtctctcattcccaaacacccagagttttattccaggcaaggactctgtcatatcttatttctggcactaaatctgtagtttgctgaacatcaaaaaattctccaacaatttattgtctaacatttgaattctgacactacccacagtcagaacagactctgattcagggctcgggtcccaacattgtcctcactgcagatgccaatcacaaaccccatgggcccatgtatgcttctgagctaatgtttaatatttggggctgccatgacctccctgaagttgaataattttgtatagccactcacagtactcagcgaaacactgtagttatgtttaccagtttcatatataagatgcagcccaggaaaagccaaatggaagaaatgcatagaacaaagaaaagtgatggggaacgatgaaatgcatagataatgctggaaaatatttgtgattaatacaattctccatcctatatgtgctccaagaacagtttatggaaagaaacactcttcccattacaacttagacggtgctcccttttcttacctgtcacagagccagacacacactctgcacattttctcctttttctcattaaaaaaatcagctgaatttgtcttcagtggtaaaaataaaatatttctgtctttttcttgagctggaatctcgctctgtcacccacgcagaagtgcagtggtgtgatcttggctcactgcaacatctgcatcccgggttcaagaaattctcctgcctcagcctcccgagtagctgggattataggcacccaccaccatgcccggctaatttttgtattttaagtagaaacagggtttcaccatgttgcctaggctggtctcaaacttgtgacctctggtgatctgcatgccttggcctcctgaaatgctgggattccaggtgagccaccatgccaggcttaaaataaaatatctccttttttttttgagttggagtattgctctgttgcctaggctggagtgcaatggcatgatctcagctcaatgcaaactctgcatcccaggttcaagctattctcctgccttagcctcctgagtagcaggcattacaggcacgtgcccccgcaggtggctaatttttgtatttttagcagagacaaggtttcaccatctcaggctggtctcgcactcctgaccttgtgatctggaattacagacataagccaccacacccagcctaaaagtaaatacttcttaaactttacttaagcttatctccctccctcaggctcctgaactttgagctaccctcagtctgagtcaacatacaaccccattttatgtccctcctaagaatatgctgatttcagggtaagacattctcttttctataatctgactttttcaccctccatttgccattcctctcccacctcctttctaatcttgtttgctcctccctagaaaagaaagctcttttctgcctacatctatgcaagccgtaaagatcttatagttagttggtacttcctcctgttgcaatacatttttgaaattcattttttttacataaatctaacatttgtattacacaaagtgtagaaggtgcctcaaaacaataacaacttcatcatcattagtaagaccgtcccccagtttcctttcattttaaccttaactgcatctgcctgtggggccccagctttccagggctctgcagtttctctgaggatgaaggctccttccatggctcgggtgagcaggctgaaacatctgcaggaaaggttccccaagaataactaactgggcctttaataacctcctgttgcaggcttaatattagccttagcttggagtcacaaggttcaagctttaatttccatgtgagagttatttacttggtttttgaaactgttcaaaaaatccagtgaaattactcaaacactgtgtttatataagggatggaaattttaaggtgcttaattttttttttgagatggagtcttgccctgtcacccaggctggagtgccatggtatgatctcagctcactgcaacctctgcttcccgagttcaagtcattctcctccctcagcctcccaagcagctgaaactacaaagtatgcgccaccataccctattaatttttgtatttttagtagagatggaatttcactatgttgggaaggctggtgtggaactcctgacctcaagtgatctacctgcctcggcctcccaaaatgctgggattacaggcatgagtcactgcacctggctaaagtgcttgcattttataccttcataagaaaagcaaatatacctacttctttcagacaatatatgtattatcttattatttctattaaaaataatgtagtaacaaattagtcatatgggaacacttgtagaaggtaccatgtttcatcacatataatttagcattacattcagaaatgaagacaacaggatatagacatgagatatttattcactgtcacaaatttacccagcaaaaggaggtactgatgttttgatgaatttatgtaactcaattatctacaacattttcctgtggaaatatattcattgtctacagccaaaatgaaagagagatttttcttattttttcccttggtagctagcattcttaaagttaaggcttggaattctgtttgaaatcactcagccataaaaaacacacctgagaaaattcctaaactcactctgggaaagaaaaagataaatgagaatgattaacaaatggaatatatgattagatattaattttttgaaactcatattttattttctttgtaaatattttcttaactttcaagccctactaataaaatgcaaattttagttaaaaaaacatgtcagctgggtgcagtggctcacgcctgtaatcccagcactttgggaggccaaggcaggtggatcacttaagactagaagtttgggaccagcctagtccatctctactaaaaatacaaaaactagctgggcctagtggtgcgcacctgtagtcctagctacttgggaggctgaggccatgagaatcaattgaacccaggaggtggaggttgcagtgagccgagattgagccattgcattccagcctgtgcaacagattgagactgtctcaaaaaagaaaaaaaaaaagggaggtcaaaataagtgaacagatcgtttcaaggtacaggtcgaatcacccaccccatcctgctcatttacgtgctcaataaccaccctcccaggagacactgcgatatgacccagtgagtcctccaggtgcattttacttcctaaatttttacgccatctcactggggtcagttttttttgtcttttggagtgttttttttttaaacaaatttttcactatttttctgccaccccccccctgcccccgccaagaaaatctaggggacagaaattatttgttttcccctcgataccagcatctggttggctgacaagcaatgtgtctccaagaattggaagctaggttgggtgaagagaatcatgtctcaaggggttagcttttctttattttttgtgagatcgagtcttgctcttgtcgcccaggctggagtgcagtggcgcaatctcggctcactgaaacctccgcctaccgggttcacgccattctcctgcctcagcctcccgagtagctgggattacaggcgcctgccaccatgcccggctgattttttgtattttttagtagagatggggtttcaccatgttggccagcctccaggctggtctccaactcctgatctcaggtgacccacccacctcggcctcccaaagtgctgggattacaggcgtgagacactgcacccagcctcaaggggttagcttttcaggaaaaaaaaaaaaaaaagaaaaaagaagaagtgcaacaggagatgcctttcagccccaaggctgtcacctgctcttttgagaggctacactgtatacttcaggtggtcctatgggagaaaatgacccaagagctaatagtcactagacactctaccagacatagccatggtgggtatcttggtttattcccagaaagtactaaaactcaggcccagaaaaaaaactgaaggatagctgaggacacatcaccctacaaagtttacaaagggtaatcttgacccaaaaacattttggtaagttctctggaaaaataaaagaaaaagaggagccgggcgcggtggctcacgcctaaccccagcactttggaaggccaaggcgagtggatcacgaggtcaagagattgagaccatcctggcccacatggtgaaaccccgtctctgcttaaaatacaaaaatttagctgggcgtggtggcgcgcgcctgtagtcccagctactggaaaggctgaggcaggaggatcgctggaacccaggagacggaggttgcagtaaatcgagatcgcgcgactgcactccagcctggcaatagagccagattccatctcaaaaaacaaaaacaacaaaagaaatgcaggcacagatattttttacaatacagtgtcaggggattattctttgctttcttctgggaaatatttacaaagagaaaacaagtcttttcaatagtgttatgcaatgctttaaaaaaaatgattaattgaggaacgtggggtacatttcaggccctgcttaggacacatgtgaaaaatgctagggaaaaatcagtcccctgtggggtgtggaaataattaagtggcaggcaattagactgaggatgctctagtcctcggattcctccttctaaaataaaaatctaaactcaagtgcagtttttgctaaattactacattcgggaaacaaaattcaggcttaaaaaaccataaactgccaattaagctctgattacataaccaggaaatttccaccttaattgtacaaagaaactacataactatacgtattgaattattgaatatggttttcttcatcatgcaccttatcaatgtttccttcaagcccctcccatggaccgcaaactacaaactatagctgggtgctcttgaatgactgattaaattatttgatatttttgcggtgactcccataatttatgtatttatttatttttttagacaaagtcttaggccgggcgcggtggttcacgcctgtaatcccagcactttgggaggccaaggcgggcggatcacgaggtcaggagatggagaccatcctggttaacacagtgaaaccccgtctctactaaaaatacaaaaaattagccaggcaaggtggcgggcgcctgtagtcccagctactcgggaagctgaggcaggagaatggcgtgaaccccagggggcggagcctgcagtgggccgagatcgcgccactgtactccagcctgggcgacagcgagactccgtctcaaaaaaaaaaaaaaaaaaaaaaaggacaaagtcttgctctgtcacccaggctggaatgcagtggtgtgatatcagctcactgcagcctccgcctcctgggttcaagcgattctctctcctctgcctcccgagtagctgggactagagacattcgccatcacactcagctaatttttctattttctttgtagagatggggtttccccattttgcccaggctggtcttcaactcctgacctcaagtgatcagcccttctcagcctcccaaagtgttgggattactggcatttcgtacctggcaccatactttttttttttctttgagacggagtctccctctgtcgcccaggctggagtggtggtgcaatctcggctcaatgcaagctccacctcccggattccacacatttttaataacagaaaagagaaactgtgaaccccacggaccaaagctcttcccattcatgaacccacatcccgagtcaggattctcccctgacgaccctcccatggtccctgcaaaatctgggagaaacgcggcgctgccgctgcagagctgcctagaaagggctccaggccatggcacagtcactgcgagaggaagagacaggaggcctggcggcccggctgtcagcgcagtcgccatcttaaggctgaagggggctgaggccaacctgggcaaggagaacttggggcgcacattgtggagctgactgcgaagaggcctgagtcccgccacagtcacttcccaccagttccaccctgcccctcttcctgtctcgggatgtcggccgggcactctcaccatttctatgcttccagggtgtcctggggttttagctgtggatctcccaatacctgcaggtcacagggccacagaggctgggcctccaggagaataggacacagaccagtgaagacgagacctgaaacgccggctgcagctagagacaaaggccgcgccaaaagcggaaagccgtcctcgtcgctccagctgcgtgcctgattggacggtttccagcccagcgtctctgattggataatgctttaggtcccgcccctcaggccctgagtgacagaagatgtgatcagatgctgggctaagtgaagagagacagcctaagctgcagcctttacaggcagggcttccttcctgagctgacccaggccccccccagagcatgagaaaattctcttttgtactcactctccttttgaatgtattcaaaaggtgaacagaagtattttgctggcatattaataatacataaaatttttgttcaagagaaaatcaacgtttactttgttagtagtgtattatcaatactaaagctaatgtttttttttttttttttgagacggagtctcgctttgtcacccaggctggagtgcagtggcggggtctcgctcacccgattttcctgcctcagcctcctgagtagctgggattacagctactattgttgaaaaacaatagacaatcacaaaaacaagctgacctttttgtgttccttaagccctgtcctgaagagccctgtgactgggctttatgccaaacaactcgttactaaagagctgtggtcccagactgcaccgaagcttcatgagacctctcctcgtctgtgcacggacgagtggccaactctggagcccaggctgttgcttccctgtctggtggtgaatcctccacagtctgatgagggtggtgtctgactctggagctcaggctgttgcttcttggtctggtggtgagtccttcatagtctggtgagtgcgggtgtcccactctggaacccatgctgttgcttcctggcctggtggagaatcttccagcctggagagtgcggtgtctgactctggagcccaaggctggaaacttggggacgtcccaaatcccggaatggaaactcccccagttctcccccttggcgtgccctatctggtgagtttcgggggaactcatgacccaagtcataataggaatttcaagcctcataaagacatcatggttgaagcagaggtgtttcgtttccagcaaagcccaatagcaagctaacaattgctcctcgaaagggttataagctttgctggcctctggcagtttctgggtccaaaaccagaaatgtacctcttcccatcttgtttctgcctaaggctccaattagcatgttgatctaggacagttacttgcagttctacgggaccatcccaaatgggtcatagatccagggccagttgcactgcttgtttatcttgttcggaagccatgatctctttctctccccaaagtcatagcgttttctggtggctgcatgcagaggttgtaacatgttacccaagtggggaatatgatgtctccagaatccaaacaagccaataaatttctgagcctcatttttagtggtaggggttgcaaattctagtattttaggcttagcctttggtaaaatgaattatttccctgcatttcataggatgcaaccagcccctatcttgacacattatcttataagcagtaaggaaacaccatccactctgggagatcccctcagcgtctcctttgctgactggaattccctgcagcacttcacgcacaaaggtctaaattgcactaatttagattcccaattcttacaaagtccggttccccttgaccattcaattgccaagggagagaactgggggagtttccatccggggatatgggaagtcctcgagcctcccgccctgcccttgttgctaaaaagtggcacacttttgtttttgaatcctgtttgtgacaccaaaagtgttctgtgcgggaaacgcacgagggggagaaggaaagacacacacacaatacctttaagggtaaacaagcttcattccacgtaaatagcaatgcagatataataagcaaattatgtaataagcaaatcaatataataagcagattgatataacaagtagattgatataataagcaaattgcaatgggaagaggagaaaggaaaaaatatatatatatttacactcaccagactatggaggattcactaccagagtgggaagcaacagcctgggctctagcatcggacattgcactcaccagacagtggaggcctcaccaccagatgggaagcaacagcttgggctccagagtcggccgctcattcctgcacagatgagaagaggtctcatgaagcttcagcccagtctggtatcctagctcttttgtaactagttgtttcgcatgaggcctagtcacgagggcctttcatgacccggcacgaggaacataaaaatgtcaacttgtttttgcgattgcctattgtttttcaataactaatgcataggaatagattgaaatagagatttctccaaaacagcactgaatgaacgcttgaaggggctcacacaacctgttctgggactcggtgaccattgtttgtgtccacgttcaattgagttcaaatttattatttaacttttcctccacaaattcgcctgtcttgatgaatcagctctgtctaggcaaagggcaaggtgaacctcttgggccttacacaacctccacctcctgggttcaagcgattcttctgtttcggtctccagagtagctggcactacaaaagtgcaccaccacaacctgctaattttttgtatttttagtagagatggagtttcaccatgttggccaggctagtcttgaactcctgacctcaagtgatccacccacctaggcctcccaaagttctgggattacaggcgtgagccactgaggttatcactaaatgatatctttttgtttcctataacaatgtgaaattacttaaaggtggtttcaaattgaaaaaataaaaagaatgcagataaaaataaaatataaaaagttcaaaaaattacaagagattacaaaatatacatgtatatcttgagaggtcaaaaatgacaaattttgtttatttacaaggttgtatttatttatttatttatatttttattttttgagacaaaatattgctctgttgcccacgatggagtgcagcggtgcgatcttggctcaccgcaacctccacctcacgggttcaagcgattctcttgcctcagcttccctagtagctgggaccacaggctcataccaggaggcccggctaattttttttatgtttagtagagacggggtttcactgtattagccaggatggtctcgatttcctgaactcctgatccgaccgcctcagccttccaaagggccaggattataggtgtgagccactgcaccagctttataaggttttattaaaattggctttagtgttgataatacactattaacaagtaaaagttgattttctcttgaacaaaaattttatgtattattaatatgacagcacaatacttccgttcatcttttgaatacattcaaaaagagagacaatgaaaagagatagaattttcccatgctctggaatgggcctggctcagctcaggtaggaagccctgtttgaaaaggctgcagctaggccaggcccagcggttcacgcctttaatcccaggagtttgggaggccgaggtgggtggatcacctgaggtcggtagttcgagtccaggctgaccaacatggagaaaccctgtctttactaaaaatacaaaaaattaaccaggcatggtgccacatgcctgtaatcccagctacttgggaggatgagatctattatatctcacagggtttacaatttctcttttctcctattataaatttatgaggccagcggctgggcatggtgactcatgcctgtaatcccagcactttgggaggctgaggtgggcagatcacttgaggtcagaagttcaagaccagcctggacaatatggtgaagccccatctctactaaaaaaatacaaaaaaattagctgggcattgtggcgtgtgcctgtaatcccagctactcaggaggctgaggcaggagaattgcttgaacctgggaggtggaggttgcagtgagccaagatcgtgccactgcactccagcctgggcaacagagaaaaactccatctcaaaaacaaacaaaaaaaatttatggggccaggtgcagtggctcacacctgtaatcccagcactttaggtggtctaggcaggtggatcacttgaggtcaggagtttaagacaaacctggccaaaatggggaaaccccatctctactaaaaatacaaaaattagttgggtgtgatggtgaatgtctctagtccaggctactcaggaggtagaagtgagagaataacttgaacccaggagtggaggttgcagtgagctgagatcatgccactgtactccagcctgggcgacagagcaagactctgtctaaaaacaaaaaaacaaacaaaaaaacaaaaaaaagtatgagtgtctctgccaaaatggaaataatttaatcaaacagtgattcaagaattgtcgagcacccagctatagtttgtagtttgtggtccatgggaggagcttgaaggaaagacatttatagggtgcatgatgaagaaaactatattcaataattgctcaggtatggttatgtaggttcttaatttgttcaattaaggtggaaatttcctggttatgtaatcagagcttaattgacagtttatagttgcttaagcctgaattttgtttcccctaatgtaaaactttttttttttttgagacggagtctcactgtatagcccaggctggagtgcaatggcatgatctcggctcactgcaacctccgcctcccaggttcaagtgattctcctgcctcagcctcccaagtagctggaactacaggtgcatgccaccatgcccggctaattttttgtgtgtatttttagtagagatggggtttcaccatgttagccaggatggtcttgatcttctgacctcgtgattcacctgcctcggcctcccaaaatgctaggattacaggcatgagccgccacacccggccctacccctaatgtagtaattaaccaaaaaatgtccttgagtttagatttttttattttagaagtaggaatttgaggactacagcctcctcagtttatttgcctgccacataattattttcataccacataggggactgattttccatggcatttttcacatatgcctcaagggtaccccatgttcttcagttaatcattttaaaaaagcattggctaacactattgaaaagatttgttttctgtttgtaaatatttccagtgagaagaaaggaaagactaatcccctgacactgtaaggaaggagaccacctttctgcttgtctcaagcctcagaaaaagaaaagaggaagcaaaagctaaagaaagtcagaaatgagatcaatagttagacagctcctggccactccccagggctggtagttaaaaatcagctcctgacctaactgcttgtattatccatagatttcaggcattgtatgaggaagcattgtgaaattttctgttctgtccggattaccgatgcatacacgctcagttatgtaccccatgcttgctcaatcaatcatgaccctttcacgtggactcctttagagttgtaagcccttaaaagggacagaaatttctgtctcagggagccggcttttgagacgcaagtctcctgatgctcctggccgaataaagcctcttccttctttaacctggtgtctgaggagtttgtctgtggctcgtcctgctacatttcttggttccctgactgggaagtgaggtgattagtggttggtcaaggcagtcttttaggtgacttaggcctgtcctgtggagcatccccgtaggggactccagccagcctgagagacacggatcctgagagtgctcccaggtaggcaattgccctggtggaatgccttgtcagtgcagtgcatgggaggcccctgtggaggatcaatgcagtggctgaacactgggaaggaactggcaacttgagtctggacatctggaacatggtaagaccggtcttagaaacttgctcactccatttgaggggaagcatggcctgatcacccatgacgtgcctttatcggcattttggttttggttttgattttgtcttggcttaaattgcttggcaccatggttttggttttgattttgatacagtgtgaattaggcaagtgtgtgaccttttaccctttccttcttgtagtgtgagttttgtcttgtctctagagaaaaatgggtcagacacaaagtaagcctaccccacttggaactatgctgaaaaatttcaagaagggatttacaggagactatggggttaccatgacaccagagaaacttagatctttatgtgaaatagattggccagcattagaagtgggttggacatcagaaggaagcctggacaggtcccttgtttcaaaggtattgcacaagatatcttgtaagccaggatacccagaccagttcccgtacatagacacttggttacagctagttttagacccccccacagtggttgagaggacaggcagcagcagtgttagtggcaaaggacaggtagccaagaagaatcccactccacccatcgagggaagtcggttcctaaagttctgtctgaccccatatcagaagactcatggcaggaaatggcaccagtgatgcctcccccttatcgagatgagagacccccacttctgagcccacagcacctgtgcctccacaggacacacacacccctagaccacccagagtaaacaagagaggatgtgaagccatgggagaaacccctcccttggtggctcatttaggacctaagactggaacacagatgcccctgagggagcagtgatatactggagtagatgaggacaggcatgtggtaaaaagtcatgcctttgtgtatcaacctttcacctctgctgatctcctcaattggaagaacaataccccatcttatactgaaaagcctcaagctttgatttgctccaaactattatccagactcataaccctacttgggctgattgccaccaactgctcatgtacctctttaacacagatggaaggtgaagggtgctccaggcagcaactaagtggctggaggaacatgctctggccaattaccaaaatgtccaagagtatgtaaggttccaattaccaggaacagactcccagtgggacccaaatgaagggccagacatgaaaagactaaaatgatatagggaggccctcctagaagggttaaaaaagggagcccagaaggccacaaatgttaacaaagtctccgaggtcattcaaggaaaagaagagagtccagcacaattttatgagagactatgtgaggcatatcgtatgtatactccctttgattcagatagccctgaaaatcagtgcatgattaatgtggctttagttagtcaaagcgccgaagatattagaagaaagcttcagaaacagactgggtttgcaggtatgaacacttcagttattagaaatagccaatcaggcgtttgtgaatagagatgcgacgggtcgtagagaaagccgtaaagaaagtgagcgccaagcccggtgaaatgctgacctgccagccacagctattaaaggggttcccccaaagggctgaggaatgggggaccccggggaaaacacacagtctgactgaccacgtctgcagcgtaaccggtgtgcttactgtaaagaaagcaggtcatttgcaacctaccagaacctaagaccaggaggcaggtgagagagttcttaggagctgtggggatctgcaggttatggatcccaaactttgcagtactggccaaacctctgtaccaagtcacaaaggggggcatccaggaaacttttgaatgggggtctcaacagcagcaagccttccatgaattaaaagagtaactcatgtcagccccagccctgggtctgcctgacctgtcaaagccatttacactatatgtgtcagagagagaaaaaatggcaattggggttttgatccaggctgtggggccctggctaaggctggtggcctacctatctaaacaactggacagggtttctaaagtttggcccccgtgtttgagagccttagcagcaactgccctgctagcacaagaaacagataaattaactcttgggcaaaacctaaacataaaacacctcatgctgtggtgactttaatgaataccaaaggatatcattggctaacgaacgctagactaaccaagtaccaaagcttgctctgtaaaagtctctgcataaccattgaagtttgtaacagcctgaaccccaccaccctgctcccggtatcagagagccctgttgagcataactatatagaggtgttgcactcagtttgctcaggttagcaaacctgacctatgggaccagccttggacatcagtagacttggagttatatgtggatgggagcagcttcatcaacccacaaggagagaggtgtgcaggatatgcacctctggatgcttttattgaagccaaataattgcctccagggttcttcagcccaggaggccgaactcattgctttaacttgggccctagagctaagtgagactgtgaacatttacactgactctcgatatgcctttttaaccctccaagtgcataaagcattatataaagaaacaggcctgttaaactctgggggaaaagatataaagtatcagcaagaaatcttgcaattattagaggcagtgtggaagccccagaagatggcagtcacgcactgcagaggacaccagtgaactcctactacagttgctttagggaactcctgagtggactcggaggctcaaaaggcagcatccaccccttaccgggcatcaatcacagccccctttctccctcaagaacctgaacttttacctacctattctaagggagaaaaaaactttttccaagtggaagggggacaggtaataaaggaaggatggatccaggtatcggatgggagaatagctgtgccacagctacttggagcagaggttgtactggctgtgcatttaactacccatctaggtcaggaatcacttgaaaagttgttaggccggtatttttacatctcccatttatcagctcttgccaaaacagtagcgcagcgatgtgttatctgccgacagcacaatgcaagacagggtccagccgttctgccaggtatacagacatatggagcagccccctttgaagatctccaagtgaacttcacagaaatgccaaagcgtggaggtaataagtatttactagttctactctgtacctggtacctactctgggtgggtagaggcttatccaacatgaactgagaaagctcatgaggcaacccgtgtgcttcttcaagatcttattcccaggtttggactgcccttatggatcagcttggacaacaggccagcatgtgtggctgacttggtacagtaaacatcaaaggtataggagatcacatggacactgcatgcagcctaccaaccgcagagttcggaaaggtggagtggatgaatcagacaatcaaaaacagtttagggaaagtatgtcagaaaacaggattaaagcggtacttttaaccctggtactgttcaagattgatgcaacccttcaaagagaacaggatattctccctatgaaatattatatcataggccccttcctatattacagggactcccaggcactccacaagagttaggtgaaattgagttacagtgacagctacagctacaggccttaggaaatttactcaaacaatttcagcctgtgtaaatgagaggtgccccatcagcttattctccccaattcaccctttctccccaggtgattgagtgtggatcaaagattggaacacatcccccttgcgaccacggtggaaaggagcccagaccatcatcttgaccacccccccacagctgtaaaggtagaaggaatcccagcctggatccaccatagctgaataaaacctgcagcctctgaaacctgggaggtgagactgagcccagacaacccctgcaaagtgattctgagaagtgtttgtgtccctgggtacttgagattagggagtggtgatgactcttaaggagcatgctgccttcaagcatttgtttaacaaagcacatcttgcacagcccttaatccatttaaccctgagttgacacagcacatgtctcagggagcacagggctggggatagggttgcagattaaaatggagtctcttatgtctactttctatatggacacattaacaatctgatctctctttcttttccccacagaaaaatattcacaactcattctgtatgatgtaaatatagcactcaaaactgtatgtgttcttgttcatgccctcaattttatactttattatctagaaaaatatatatgaaccgatgtggcggatcttatgctgctcttttttctcagagttagagaatatattagagaatatttctgtgttgaaaactattttattggataattttagtcatcctataagtcagaaccagttctctttatgctcgcatttcaccttaagtcaaattgaaaattctgctcatggccatttaagtaaaggtgtgtgtgtgtgtgtttcagggaccactgcaatttagggatgtggccacagaattctctctggaggagtggcattgcctggacactgcacagtggaatttatatagggatgtgattttagagaaccacagaaacctggtcttccttggtgaggataacctgaatacataattcataatataccctaaagattttatttctctttttttgcagaatttttttagtaatttattcttttcataaaagagtttcagatccactttttccagaaaatcttcagaatttgttcatttagaaaagaatttcttcaagatgtttcatcttaatccagactttccacattcctgagttgagctgtattcttcactctaaattagtggtaattccagaaacttagtggcataaaatattgttgccccacctgaaaatctaattgccaccaccaatttttgattcagtagtaccagatagtaaaattaagaaaccggcatattgaaagtattcttccttcctttttttttctttctttctctttttctttctttctttctttctttctttctttctttctttctttctttctttctttctttctttctttccttctttgtttctttgtttctttctttctctttctttcttctttctttctctctctctttctctctttctttctttcttctttccttctttttttttccttttttttttttttttttttgaagagtttcactcttgttgcccaggctggagtgcaatggtatgatctccgctcaccacaacatccacttcctgggttcaagcaattctcttgcctcagcctcctgagtagctgggattagaggcctgtgccaccatgcccggctaattttttgtatttttagtagagatggggtttctctatgatggtaaggctggtcttgaactcctgacctcaggttatccaccacctcagcctcccaacgtgctaggattacaggtgtgagccactgcacctggctgaaagtattttctaaatatttataaatttctgttatgaattagtattttggtattaatttactagaatattttattatatctgctctgctgagcacatttagtaatgtgcttataattggagaatatgagcaagactcatgttatttatttttaataaaacaggtattgttgtcctaagccagacctgatcacctgtctggagcaaggaaaaaaacccttgactatgaagagacatgagatgattgccaaacccccaagtaggtgtgagtgaaaatgaatacaagagacgacagagataagaggtcccaaggtcaatgagaaagcaagtttttaaaatgtgattcaggaagctgtgttccaaaggaaatagttcctgggcagctgtgttatttgtttatttatttatttaattttgctcctacaaaggggcatcttctgtcttatgattttaaattctctaaggattccacttttcttttggtgagcttccttcaagttcacagtgagagccaaagtcctcttcatggcatataagagactgcacaggctgggcacattggctcatgcctgtaatctcagaactttgggaggctaaggcagtggatcacctgaggtcagaaattcgagattagcctgaccaacatggtgaaacctcgtctttactaaaaatacaaaaattagccaggggggttgttgggcacctataatcacagctacttgggaggctgaggccaaagaatcacttgaacccagaagacggagcttgccgtgagccaagatcgtgccattgcaccccagcctgggcaacagagtgagactccatcacaaaaaaacaaaacaagacaaacgaaaaagagactgcacaatctggctgcttttccattgttttgcagatatgcaaatatctatttgcattatttagagaaactaaaattatttttcatgttatctttttgcatcaggtctgatatgtgtgagagtaatagtttctgttgcacttttttgtttatttttttcagcacagtctattctgtttttattactataaagtcttgaaatatagtttgaaattataagtatgatatttttctgctttattccttttcctcaagattgctttggctattcaaagtttattttagtttcatgtaaattttagaattgtattttccagtactgtgaaaaaaatgccactgcaattttgataggaagtctattgaatctatagatcactttggataatatggtactttattaatatttattctttcaatccatagacaaaatattttaaaatttatttggatcttctttaattttttcattttttattgtaaagatttttacctccttggtcaatttttttctcagaaatttattacttaatgctacagcaaataagatttttttccctctattttgttagatagtttgttttaagtgtatgaaactgtagccaggcacggtggccaacgcctgtaattccagcactttgggagactgaggtgggtgtatcaactgaggtggggagttcgagaccagcctgaccaacgcggagaaaccctgtcgctactaaaaatacaaaaattagctgggtgtggtggtgcatgtcagtaatcccagctactcgggaggctgaggcaggagaatcacttgaacctaggaggtggaagttgcagttagtcaagatcacaccattgcactccaggttggtcaaaagagcaagactcctcaaaaaaaaaaaaaaaaagtgtatgaaaccctatatatacttgtatgttaattttgtattttgctaatttactgagtgtacttaatagtttagacagattttaatgtactgtttatggttttttatatacacaattgtatgatctacaaacagcaactttttactttttttatttcaatagtttttttatttctttgactaattcttctgccacatacttccagtgctacattaaaatagaagcactggccaggctctgtggctcacagctgtaatcccagcactttgggaggccgaagcgggtggatcacctgaggtcaggagtttgagaccagcctgaccaatatgatgaaaccccatctctactaaaaatacaaaaattagctgggtgtgtcgacatgagtctgtaatcccagcaactccagaggctgagacaggagaatcgcttgaggcaggaggcagaggttgcagtgagccgagatcacaccaatgcacttcagcctgggcaacaagagcaaaactgcatctcacacctacacacacacacacacaaaatagaagcattgacaatgctcacaatatagttttgtattggtgtctgaattcaatgcagcaaatacctcttcaagttttcacaaactgattttagaaggtaaagatcttttgttggcccttagggtgatgagatgccctctgaatttgtagtgaagaggggttgtagcttggtcacaaggctgctgggtctgcactagggtccacctttagttggcttgttacaggggctttggtagttgtaattctcattttatttttagacagactgaatatccttcaagactttgttccatagggcagacactagggcaggtttttgcagtcaggtctgcatatgctgggccttgtatcaggatgtggatgagtgtggctttcagtgagtaccaaagagcatttcctcaggtaactgtgtgggtttctatataggcagaactgaccataaactgtggctcaggtaactgaaactgagtcattgaattgcttcagggaccacagtaaaggccaaagtctgcaggcctgcctacatggctgtaagtgtgtgccttcctccaggtcagggaatggcaggacctctgccagactgtggctgggaaaagtttgggatggttacagagtaagttctgaattttcagtaggaccaagttggatgaatcttatcctggtctgtagccaagaacaggggtcctgtagtttcgcacctgaatgagggcctgccttctgaataaaactcttctcaatcttaagctttgacagtgtttcacaactccctccctggatctcaaatctctcttagaggcacttattttggagatggcatcttgctacataacccaggctggtctcgaaatcctggcctgaagcagtgacataaccttaatgtaccatgtagctgtcattacatgtgtgagccacaatgcataaaggcatttttgtcaggtatggctgatatatatacatacacatatatatatatatatacatacacatatatatttttattgtaaggggatatgaaaatagggcacttttagtcttttcatttttttctttttctttttttttttttgatgtggagttttgctctttttgcccagactgtagtgcaatggcacgatcttggctcactgcaacctccgcctcccaggttcaagcaattctcctgcctcagcctcccaagtagctaggattacaggtacctgccaccatgcctgactaattttttgttatttttagtggagatggggtttcaccatgttggccaggatggtctcaatctcttgacctcatgatccgcacgccttggccttccaaagtgctgggattacaggcatgagccactgcacccagctagtctttttatcttactgatgtcactctccttatacatttttactttctattttctacttcaagtttgtctgtaattttagattcagatatttaaaacaatttgttaaaatttgcatattatgcctgcagtaaattagataattagtgggcactccatatttactaaaatatttacttataaatttaattttgctgctggcaaaaaggaattacagaattttcctctactttcttcagcctatatctgaataacaacatagtttattttctaattgttttacatatcagagggtctaaccctattctgcaaagtagatatatatattttctatatttaacaatgtaaggctattctttgcttcaaagttggattacagcagtttcattttgtgtaagaatagcatatatttaaaacaaatataactctagtttcttttaaatgctatttattagaagtttctcattagaatcttctatttataattatactccttattctctgaaattttactgccacacagtgcatgccaatgattcaaaatactcacatttgatgagtatacagtaatagttaaatattccagttacctagacaattttttttgtttttgtgagtctgagtcacgctctgtcacccaggctggagtacagtggtgcgggcttggcttactgcaacctccacctcccgggttcaagcaattctcgtgtctcagctttccaaggagctaagattacaggcataagccactgtgcctggcctcagtgtaggtttcttaacatcagttttttgtgtctgttggctttactttcgtattacaattttagacaatttgcaattctgtttgtacagtttaagtcaatttgaggtttaattaagagataaattatgcatgtttatcacaatcagattacatatgtctgtgtgtttatttataaatgtgaccccaattttagttatggcttatcctatattctttcttagccgattttcaatggcagttttatcttgtctaagtgagttgtcatggaggtagtcttatttttaccatgtgtttaatgatgaatacatatttcgttttgtgagagaaacactttagtgatttgaaggtaattttcaaaaagatttataattctgtatttttttcagttttttttttaaagaatttttttttgagacggagtcttgctctgtcgcccaggctggagtacagtggcgtgatcttggctcactgcaagctccacctcccaggttaacgccattctcctgcctcaggctcccgagtagctgggaccacaggcgcccaccaccaagcccagctaattttttgtatttttagtagagacggggtttcaccgtgttagcctggatggtctcgatctcctgacctcgtgatctgcccgcctcggcctcccaaaatgctgggattacaggcgtgagccaccacgcccgaacaaaagaaatattttaaaaacacataaaatgtaccatcttaaatctattgaagtgtatatttcatggccaggcatgtttgtggctctcatctgtaatcccaggattttgggaggccaagacagaaggatccctggagcctgaaagcttgagaccagcctgggcaacatatggagacctttctctattaaaaaaaaattaataattgccaggcatggtggtgtgcacctgtggtcccatctactttggagattgagggggagtcaaaattgtgcctctacattccctcttgggtgacagagtgagatcctgtctcaaaaaaaagctgttcatttcaggaatgttaattatattcgcattgttatgcaaagacttctagaaactttacatcttgtgaaacttaaactcagtacccattaagtaacaactgctaattttactctctctccagccctagactggacaaaccttccactttctctttttatgattttgacttcttaagatacctcatataaatggaatcatacagtatccattattttgttactggattaattcaggtgacataatattctcaaggttcatcttaaaatatgacatgatttttttttaaggtgggataatatttcatcatatgtatatgttacattttttgatatgtttataaatcaagagacatctgggttgcttcagccttttgtcttttgtgaatactggcacaataaacatggattttcaaatatgtcattattattatagcaagtggggtattgaaatagcctagtataattatatttctctctatgtgcttattcagttttgttagtatttgctttatatatttgaaaccctaatttgaaacacagacacacacaaatacacacaaatttgtgataagttcccagtgaatgaatctatgtattgtttaatgcccttctgtgtctttttgaagttttgacttaaagtacattttataaaatatgacagtttttgacttaagatgtagcttttgtaatattattttgacctcttctgctctcatttcattaatatttacatgaaatttctacttccatctcaccacttacagtctttgtcattagatctgaggtgactcttgtagaaaggcaagttggatcttgattttcaaattttttttttttgagatggagtctcactctgtcacccaggctggagtgcacgtggtgcgacctgggcttactgcaacctccgccttctgggttcaagtgattctcctgcctcagcctcctgagtagctgggattacaggcaggcaccaccatagttgactaacttttgtattttttgtagagacagggttttgccatgttggtcaggctggtaaaattttttaaaaaggctttttattgaaagtatgtctcttgattggaaagataattatatatatttaaatagttttctgaaagaggaaaacttaataatttgtgtgtgtgtgtgtgtgtgtgtgtgtgacagagtctcactctttcatccatgttagagtgcaatggtgcaatctcagatcactgcaacctctgcctcctaggtccaagggattctcctgtctcagccacctgagtagctgggatcacaggcacctgccaccatgcctggctaatttttggtatttttagtacagatggatttatgccatgttggccaggctgggcttgaattcctgaccttaagtgatccaacttccttggcttcctaaagtgctgggactacaggcataagccgccgcacctgaccaatgttactttattaattgttttatttgattcttgtatctttgtctctcattttttctgcctttgtgtgtgtgtttttttttaaatttttgtattgatatgctttcaattttcttcttattttcttttgtgtatctatacagatattttcttagtagtgtcttggggattacacaaaacctctaaaagatccaacaatatgtttaaatgaggtaaaaaattaacttcagttgaatgcaaaaattcttcatgattacatctgccttcaactttgttattgattttgctaattatattatttatttatttatttatttattttttgagacggagtctcgctctttctcccaggcaatactgcagtggcactatctcggctcactgcaagctccgcctcacgggttcacgccattctcctgcctcagcctcccgagtagctgggactacaggctcctgccaccgcgcccaacctccgcctcccaggttccagtgattctagtgcctcagcctcctgagtagctgagattacaggtgtgcaccaccacacttagctaatttttgtatttttagtaaaggcaggctttcaccatgttgaccaggctaccttttatttgtttgtatatttctttcttcctttccttctttatttctagaagcatgttcgttttaaaatataaattatgaatattaaaaatcttcttttctctgtctttgattactattatggctgatttaaaaataagttttggaagaagagaaaacggcagggcggcagcggctgtaggttgtgcggcggcagcggctcttccctgggtggacgatggacagccagagcaggaaggtggtggtgtgcgacaatgacactgggtttgtgaagtgtggatatgcaggctccaactttccagaacacatcttcccagctttggttggaagatctattatcatgtaatgcccaaccttgttttttcctttatttacctagccttgtttctcccttagctaagagaaccagacaaactccatcttggctctttcactggcagccccttcctcaaggacttaacttgtgcaaggtgactcccagcacatccaagaatgcaattaactgataagatactgtggcaagctgtatccgcactccccaagaattcatctgattgataacgcccaaagccccgcgtttatcaccttgtaatagtcttaaagcccctgcacctggaactgtttactttcctgtaaccatttaccttttaactttttgactacttaacttctgtaaaattgttctaactagacacccctccccttcctaaaccaaggtataaaagttaatcaagccccttcctctgggccgagagaactttgcacgttagccgtctctcggtcgccggctaataaaggactcttaattcatctcaaagtgtggcgttttcctaactcgctagggtacaacaatcagatcaaccaccaaagtgggaaacattgaaatcaaggatcttatggttggtgatgaggcaagtgaattacgatcaatgttagaagttaactaccctatggaaaatggcatagtacgaaattgggatgacacgaaacacctgtgggactacacatttggaccagagaaacctaatatagataccagaaattgtaaaatattactcacagaacctcttatgaacccaaccaaaaacagagagaagatggtagaggtaatgtttgaaacttaccagttttccggtgtatatgtagccatccaggcagttctgactttgtacgctcgaggtttattgactgctgtagtggtagactctggagatggcgtgactcacatttacccagtattagaaggcttttctctccctcatcttaccaggagactggatattgctgggagggatataactagatatcttatcaagctacttctgttgcaaggatacaccttcaaccactctgctgattttgaaacggttcgcatgattaaagaaaaactgtgttacgtgggatataatattgtgcaagagcagaaactggccttagaaaccacagtattagttgaatcttatacactcccagatggaggaatcatcaaagttgggggagagagatttgaaacaccagaagctttatttcagcctcacttgatcaatgttgaaggagttggtgttgctgaattgctttttaacacaattcaggcggctgacattgataccagatctgaattctacaaacacattgtgctttctggagggtctactatgtatcctggcctgtcatcacggttgaaacgagaacttaaacagctttacttagaaagagttttgaaggatgatgcggaaaaacttcctaaatttaagatctgcattgaagacccatcccgcagaaagcacatggtattcttgggtggtgcagttctagcggatatcatgaaagacaaagacaatttttggatgacccgacaggagtaccaagaaaagggtgtccttgtgctagagaaacttggtgtgactgttcgataaactccaaagcttgttcccatcacacccgtaatgctttcttttttcttttattgccaatctttgaactcattcaactccaggatatggaagaagcctttctctaccctttgactggaaaggtcaagttttattctggtgtcttgggggagctttgttaaatttttgttaatgtgggtaaatctgaatttaattcaactgcttccctacatagactagagggctaaggattctgtctgctgctttgtttcttctaagtaggcatttagatattcctgtaggcttcctattttcactttacctctctaatgctgctagtcactaggtggtacgcatttattagcataagaaaaaaactttaacaggagcttttacatattactgggattgggggtggtttgggatgggtgggcagctgctgaaccctttagagcatttcctctgtaatgtggtgctttcaactgtactgctgcagctttaagtaccttaaagcttctcctgtgaacatcttagtgaaatgttaggttcagaactaaagtgttttgggtagattttgttgctggggagggtaacagtgggtggtctgatttttatttttgaggtttttcacactggagtacatagaggaactttatttacagtattttgatttggcaggttttcttctacttgtgctctgcctggagctgtttccatatgataaaaaaagcaagtgtagtattccattactatgtggcttagggatttatttgttttttaaaatcaaccacgttagctgggactagactccctacaatccttcaatggaaaagtaacatttaaaaatccttggccgggcgcggtggctcacgcctgtaatcccagcaccttgggaggccgaggcgggtggatcatgaggtcaggagatcgagaccatcctggctaacaaggtgaaaccccgtctctactaaaaatacaaaaaattagccgggcgcggtggcgggcgcctgtagtcccagctactcgggaggctgaggcaggagaatggcgtgaacccgggaagcggagcttgcagtgagccgagattgcgccactgcagtccgcagtccggcctgggcgacagagcgagactccgtctcaaaaaaaaaaaaaaaaatcctttgggtaattcaaattacagatttgaaagtgcttaagatctggtgttttgttaatgcttctgtttattccggaagcattaaggtaacccattgccaagtatcattcttgcaaattattctcttatataactgaccagtgtgtaataaaacaagcaggtacttataaataattactggcagtaggttataattggtggtttaaaaataacgttggaatacaggacttgttgccaattgggtaattttcatttttctttctttttttttttttttttgagacagcgtcttgctctgtcgcccaggctggagttcagtggcatgatctcaactcactgcaagctccacctcctgggttcacaccattcttctgcctcagcctccagggtagctgggactacaggtgcccgccaacacgccccgctaattttttgtatatttaatagagacggggtttcactctgttagccaggatggtcttatctcctgaccgattgggtaattttcattagttgttttatttgttttgatttgaaacctaatttgactgtttaaaatgttggccaaaaaaatcaagatttaaattttttatttgtactgaaaaactaatcataacttaattttcagccatctttgaagcttgaaagaagagtctttggtattttgtaaacattagcagactttcctgtcagtgtcagaaaatcctatttatgaatcctgttgatattccttggtatctgaaaaaaatatcaaatagtacccatacatgaattatttctaagtttgaaaaataaaaagaaactacatcacactaattacaaaatacaagtttctctcgcatccgtgtggagaccaacaaacaggctttgtgtgagcaacaaggctgtttatttcacctgggtgcaggtgggctgagtctgaaaagagagtcagccaagggagataagggtggggtcgttttataagatttgggtagataaaggaaaattacagtcaaaggggggttgttctctggagggcaggagtgggggtcacaaggtgctcagtgggggagtttctgagccaggatgagccaggagaaggaatttcacaagataatgtcatcacttaaggcaaggactggccattttcacttcttttgtggtggaatgtcatcagttaaggcaggaaccacccatctggatttgtatgtgcaggtcacaggggatataatggcttagctttggctcagaggcctgagaacaaattctggaaaaaaatatttttcttcattttaaaacttttttttaaactaataatggctttgaaagaagaggcttaatttggggtgactaaattcaaaagaaattattgacttgagggtctctgtttggtaagaatacataattagcttaaataagcagcaaaaggttagttttaattatgtaacttctgttaatattaagtgttttttgtctgttttacctcaatttgaaaagataagtttgcctgcatgctggacatgcctcagaacacatgaatagcccatactagatcttaggaacatggatctttgagtcactttagactaagttcttatataaatatccccagctttttgagaacagagcttgttaaaggatgcacatgtagggccagtacctactggcaattgtgttcagggaaatgggattgacttggccatttgtcctttggtcataattttaaaatgtgggagtaaaaaacaacaaagaattgaatggactcttaaaacaatgaaagagcatttatcatttgtcccttgaatgtagaatttgtttttgatttcataattctgctgggaaacgtgacagttaaaatggtgtattatgtatatatattataatttagaaataccattttataattttactattccaaggtgacataatgcatttaaatttgggatttgggtggagtattatgtttaactggagttgttgtcaagtatgaatccctcaggaaaaaaaaaatctgttttaaaaagcaatctgattcttagctcttgaaactattgttacttaaatttccaataattaaaaattttaaatttttaaattagaattgccaatactttgacctttgagaagggtttcttagaaatacatttagtaatgtccccaagacattagtcttacatttaaacttttttctttaaaacatggtattggtggttaacttttacacagttctgagttctgctaatatctggaaagtatcttgagatatcagtggaaagctaaacagtctaaatttaacatgaaatacttctttttgattcagaaaataaaatcagatttttttaatgtcaaaagcattaaaaaattaaaaaaacaaaaataagtttttttgaaattatctgcataaaggtttttgcttcattattgacataacttgagacaatacagaaatgaaaatgaacatttgttagtaaaacagcaattatctagctcctggtagtgatttaatctctcacctagtctttagaacttccatcaagacaagaactctttttttccaagagtgtgtgatgtaaaatcacactcttgtttttttgtctttgtggcagaatttgggtatttatggtaatgaaaaagaattctaggtctcttttcagaagaaagatggtgatgatggaagcaaatataatggtacttggtacttagccacatttcaaagcatgccagtacaaagctaaatgaagaaagtcaaataggaaatgagaaaaaaatagctcctagaaacacataaaatgataacaatataattaacaaacaatttttttttttttttttttggttttagacagagtttccctcttgttgcccatgctggagtgcaatggcacaatcttggctcactgcaacctctgcctccgcggttcaagtaattcttttgtctcagctttcccagtagcttggactacaggcacatgccaccacgcatggctaacttttgcatttttagtagagagagggtttcatcatattgatcaggctgatctcaaactcctgacctcagatgatccacctacctcagtttcccaatgtgctgggattacaggcatgagccacagcgcctggataacaactttatttctttaagcaattattttaaatataagttaattaaactacttaataaaataaaatgaaatgtaattttaggactttggaaggccaaggtaggctgatcacttgatcccaggagttcaagacaggcctaggcaacatggcaaaactctgtctctataaaaaatacaaaaaagctagcctggtgtgacggcacatacttgtaatccaggtatttgagagactgaaatgagataatcagcagactttgagagattcaagcagcagtgaaatatgcaaatcagcctggttggcacagtgagttccattctgaaaaataaatgaggctgggcatggtggctcatgcctataatcccagccttttgggagactgaggcaggcagatcacttgatgtcaggacttaaagaccagtctggtcatcatggtgaaaccccgtctctctaaaaatacaaaaaattagcagggtgtggtggcagacacctgtaatcccagctactcaggaggctaagccaggagaattgcttgaacccaggaggtggagtttgcagtgagcagagattgcaccattgcactccagcctgggcaacaagagcaaaactccgtcgcaaaataaataaatacatatataggctgggtacagtggctctcgcctgtaatcccagcactttgggaggctgaggtgggaggatcatgaggtcaggagttcaagaccagcctggccaatatggtgaaaccccatctctactaaaaatacaaaagatagttgggtatggtggcacgcatctgtagtcccagatattcaggaggctgaggcaggagaatcacttgaacctgggaaatggaggtggcagtgagccaagattgtgccactgcacaccagcctgggcaacagagcaagactccatctctcaaaaaaataaaaaaataaataaaaataaataaataataaaaaaaaggaaatagaatgcttgtgcggttttttaaaaagcatacgctatgctgcctacaagagattcatttaagcattgagtcaaataggctgaaagtaacagaatgaaaaaaatgtacattccatgaaaatagtaaccacgattgagtgcagtggtcataattatattagacataatatgctttaagtcaggtagtaccatgagacaaagattgacgttatattatgttaaagtgagttgatttaccaggaatctataactataatatttacttatctatatatatatgtgtatataacatcagggctccaaaatatataaagcaactattgacaaaagtgaagcaagacatacatagcaacataattgtaaacatcaaaaccccatttgcaataataaatagaaagtttagataaaaaataagaaacagaaaacctagacaccattatagactatattaattattttgcatatagatgaatatttgagagtgcataatttataaagaaaaaaggtttagatggctcacagtttggcaaactgtataagtgtgtgccagcatctgcttctggtgaggatttcaggaagcttaaaatcatggtggaaggtaaagagtaactggatatattatatggtaagagacagagcaagtgtgaggtgaagaagccaggttcttttaatgaaccagctctcatttgaattaatagagtgtaaactttttggttaccaagaggatgtaccaagccattcatgaaaaatttgcccctatgacccaaatgtgtcccaccaggtcccacattcaacattgaggatttatattgcagcatgaggtttggaaaacatggacatccaaaccatattatagaccaactagcgttcgcagacacacacaaaactccccagtcaaaaccaagataatgcacaatattcttattttcatctggtgtattttgttagggcacatagcaggttttattaaattttaaaatactgactgggtacagtggctcttgcctataatcttaacactttaggagaccaaggtaagaggatccaccaggaattatgaatatttttcagatggaaaagacatgttgagttagaagacacctctcaaatttttttttttttttttttttttggagacggagtctcgctctgttgcccaggctggagtgcagtgctgtgatctcggctcactgcaagctccacctcccgggttcaggccattctcctgcctcagcctcccaagtagctgggactataggcgtctgacacctcacccggctaattttttgtacttttagtagagaacagggtttcaccatgttagccaggatggtctcgatctcctgacctcatgatcctcccacctcggcctcccaaagtgctgggattacaggcggagccaccgcacctggccaccttttttttttttttttgagatggagtttcgctctcgttgcccaggctggagtgcagtggcacgatcttggctcaccgcaacctcggcctcacaggttcaagcaattcttctgcctcagcctcccaagtagctgggattacaggcatgcaccaccacaccaggctaattttgtatttttagtagagatggggtttctccatgttgaggctgatctcaaactcctgacctcaggtgatctgcctgcctcggcctctgaaagtactgggattacaggcatgagccaccacgcccggccatacactgtgtattttctaacaaaaactgaattaaactaggaattaaaagcaaaagtcaaactggaaagttcaaaaatatgtatatataaaacacttcaatatatttttgctcaggggtcaaaaaattttatttttcaaaaatgtcaatacaacctaccattaaaagataatacaaagttgtttgtcagaaatgtttatttatttacagaaatagcattgattattgattagatatatatcgttatggtttagggtatgggatatagtgtccaatgtggcattattagtttaatttatagctacttgtggcaatagtgaacagtttcaagacatgaatacatagttcaaagaggggagaaataactgcacttttattttcatctctctgaatttgataaccaaaaggacttgcattttttagataaaagttttttatttcccaaatctcaagatctaaattcaaaatttggagctgcacatttagggcctgaatggctggagtagcagcaggtgttacctgtacatttgtgagcactttggcaagaggaggaaggggaaagtggagattctcatgtctatatgtctactcaatgcacacacgttactctgattgggtttctgggccaaatagtttctgtatcagttccagtctgaagatacaagagtcagtgaaagaggtaaaatgattgattgctgccctgtgaagtttgtagaaatgtgatctagcctctctagaagtgactgcagaggactatgaatgccaactaggcagagacacaattctgcctgcatatttaggggacagcatgcactttgctgcacaactctgagctgactggaagcctgagagggaaagtctcctctagagtaaattctggatgtcaccttatgtgtttatatcatgtctggtaattctagacagtgtttggaaacaataattaaatgaaaatttttctccaccccagagaaactccacaataatagaatagaaagaaactgttttattacacaattgaacttgaatgtgacacggatcttcatcaatctgcttaagagacggaaagatggtcactataattaggccacaagtagaagaatttccagcaccatgtcatacatagttcatcctaaattcacctggatactgaagaggccatctgtgtatgctaattacttatattcaatgacaaaaacttttcacatcttcataataggatgtagtttagcagcttgaagccaggtgcctgctgaaggtaggctttcactctgctacaaaaatggttgaatagtgttctatctttttggctacttacattttagagcagtggctctgtactccctggcactgggctacagcactcctgcttgctttctcctggttgctagtgtcctctcttggcctctaccatctgccactgaggcacaaaccacagctcacattttatgtgaatcctatttgccacagcagcactctagtgtcacatcagagagtgaggcctgagctgcaggaggagagcctgcaggcctcctgggtagaattacaccttcacaatcatgagaatgtgagcagtgtttcagcgtcaatttctacgtatagagatgacaaggaaaagataaagctgaattttcagcatgagtccagatagtgatagctgcaaaaattctcattgtgacagcccaccttaatctgacaccatgggacactaatagggcttctgaaacacacacccaaagcattggagagaaaaatgagatcttgatctgagcaagattattttcatagaaaaatattataaagatcttaagaaaaagctcagattagatatgattgatcaagtcagtcaaaaaatattcccctaaaagcaatttctctctaaacacccaaagtgcacagctactctcagcatgagaaacatgagcttcaggaagaaagaaggcagattttcagaagaattttataaagttttttttccatctttggtgctctctcatctcctagccagtgaatggagttctatattgaaatacatctgacaacttccaacaacactttttgatgaagaaatagaatctgactgttttcatagagtggaatatattagaacttgtaggctgggcgtggtggctcacgcctgtaatcccagcactttgggaggcagaggtgggtggatcacgaggtcaggagttcaagaccagcctggccaagatggtgaaaccccatctctactaaaaatacaaaaaagtagccaggcacggtggcaggcgcctgtagtcccagctactcaggaggctgaggaaggagaatcatttgaacctggagggtggaggttgcagtgagccgagatcatgccactgcactccagcctgggtgacagagtgaaactccatctcaaaaaaaaaaataaaaataaaagaacttgtaacatagttaactgaatagctattattggttttgggtggccacatcacctgtctttatttttcctgtaatagcagcattccaatttagtgcaataaaagatactaaagttgtgttaattcataattatccctattgaataaagtaataaacatgtcacactaatatctactgtaacaatttggtagtaaattttctttggatattaggtataagtatctaagtatgaataattttaatgaactagtcataatgtatgtagcattttaaaaaattgcaactatagccaggcacggtgtctcacatctataatcccagcactttgggaggcctaagcgtgcagatcatgaggtcaggagtttgagaccagcttggcctatatggtgaaaccctgtctctactaaaaatacaaaaattttagccaggcatggtggagcctgcctgtggtcccagctacccgggaggctaaggcagaagaatcgcttgaacccaggaggcagaggttgcagtgagatgagattgcagcactgtggtctagccaggacaaaaaagtgagactccgtctaaaaaaaaaaaaaaaaaaaaaattcaactatacttcagttaaaacactatatttcaaaagtataaataacaatattaaaataacaacttaagtgattcattcaaagtaagtattgtggctttatattcatattatgtagaaaatactgtttacaggtcacgcctgtaatcccagcactttggaggagtgaggcggttggaccacctgaggtcgggagttcaagatcaagctggccaacatgagaccctcatctatactaaaaatacaaaaacttagccaggcatggtggcacatgcctgtaatgccaggtacttgagaggctaaggcaggagagtcgcttgaacctgagaggcggtggtttcagtgatccaagatcatgccactgcactccaacctggacgacatggtgagactctgtctcaaaaaaaataaaatactgtttaatgtatatgaatgcaatttgtttacaaaccctacacataactatgctaatcgttctgaagtaataaatagaaagcaagatacaactacagactctactgttcagtttatgcactgaactgtttttgctttcaccgtataagtccttcagcctgcaaatattgggtaattaccttggataatcagatttctttcaaagaaacttagtatctttcagtctttatcattctgtattgcaaaatttaatcctatctttgtgctaagcatctgtgtgctcttaaaatgagcatttatctaaaccatctgtgtctactttaaaggactaaaaatgaaaaagataaacttttcagaagcaaaaagaaagcaaaaaacctgaagtactagataaagataatctggagtctgaaaaaatgactaaaggtttatttaactgttaatataatttacatatatttcaaaaaagcagagaaaaatatctacatataatcaaaatgccttaagaaaagagagaatagtaaaatagctttttgatactttttaaagagtttttgaactcttggacacctgaattttgcacactatatgcacttaaggtgatgcttatgggagaaaaacacaagagagaatgatgttataaaaaaatccatgcatgcaaaagacctttgcaacagaatagagagaccagaaataatgccaccctcctacaaccatcagatttttgtcaaacctgacaagagaaaagtgggaagaattctctctttaataaatgatgctggaataactacctagcactatgtagaagacagaaactggaccccttcattacaccatatacaaaaatcagctcaagataaattaaagacttaaatgtaaaacttaaaattataagaaaccctgcaatataacctaaaaaatactgttctagacatagaaactggcaaagacttcatgatgaagcttccaaaagctattgccacaaaagcaaaaattgacaaatgggacctatttaaactaaagagcttcttcacagcaaaggaaactatcaacagagtaaagagacaacctacagaataaaagaaaatatttgcaaactttgcctctgacaaaggattaatatccagaatttattaagagctcaaacaagtttacaagaaaaaaaacaaacaacctcattaaaaagtagaaaaaaaatgaacatattcttttcaaaagaagacaaatgtgcagttaacaagcatgtgaaaaaaatgctcattgctaattattagagaaattaaaagaaaaaccacaatgagatactgcatcatacccatcagaatggctattttttaaatgtcaaaaaataacagatgctggcaaggttgcagagaaaagggaatgcttatactctgctggtgggagtgtaaattagttcaacagctgtaaaaagcagtgtggtgattcctcacagaattaaaaacagaattatcatttgactcaggaacctcataattgggtatatacccaaagaaatataaattattataaagacatatccacatgcatgtttattgcagcactattcacaatagcaaaggcatggacgggtcctgaatggctatctatgatagactggataaggaaaatgtggtatggtcagatgcggtggctcacgcctgtaattgcagcactttgggaggctgaggcaggtggatcacacggtcaggcgtttgagagcagcctggccaacataatgaaaccctgtatctactaaaaatacaaaaaattagccaggtgtcgtggcaggcacctgtaatcccagctactcacgaggctgaggcaagagagtcacttgaacccaggaggcagaggttgcagtgagccgagatcacgccagtgtactccaaccgaggtgacagtgtgagactttgtcaaaaaaaaaaaaacaaagaagaagaaattaaaaaaaaagaaaaacgaactggacctttaataacttcctctttctggcttaatattagccttagcttggagtctcttggttaaaactttaatttccatgtcagaggtattcacttggtgttgaaactaactgaaaaatccggtgaaactactcaaagtgtttacataagggaaggaaatttaaagtgctcacttttttttaatggtttttttttttgagatggagtctctctctgtcacccaggctggagtgcaatggcacaatctcagctcactgcagcctccacctcccgtgttcaagccattctcctgcctcagtcttccaagtagctgggactacagtcatgcgccaccacactcggctaatttttgtaattttagtagagacggggtttcgccatgttgggcaggctggtctcaaactcctgaccttaagtgatcaaaccgcctaggcttcccaaagtgttgggattacagttatgagccagtgtacctggctaagatgcttacattttattcctccataagaaaagcaaatatatctacttctttcagacaatatatgtattattttattatttctattaaaaataatgtagtaaaaaattagtcatatgagaaaacttgtagaagataccatgtttcatcacatataatttagcatttaattcagaaatcaagacaacatgatatagaactgagatattcactgtcacaaatttaccctgcaaaaagaggaactgatgttttgacaagtctatgtaactcatcaattatctaccacattttcctgtggaaatatgtttattgtctacagtcaaaacagaagagagattttctttctttcttttttttttttttttatggagtctatctctgttgcccaggctggagtgcagtggtgtgatcttggctcacggcaacctccacctcccaggttcaagcaattctctgcctcagcctcccaagtagctgagattacaggtgcctgccatcgcgcctggataatttttgtatttttagtagagacagggtttcactgtcttggacaggctggtgttgaaatcttgaccttgtgatgcatccgcctcgtcctcccaaagtgctaggattaccggcatgagccactgcgcttggctgatagctagcattcttaaagctaaggcttggaattctgtttgaaatcactcagccatagaaaacacctggccaggcatgggggctcatgcctgtaatctcagcactttgggaggctgaggcaggcagatcacgaggtcaggagttcgagaccagcatgaccaacatggtgaaacctgtctctactaaaaattaaaaaattagccgggcatggtggcatggtacctgtaatttcagctactcaaaaggctgaggcaggagattcccttgaacccgggtggcaaagctgagatcatgccacttgttggggtgatcagacccaataccagaccattgtggctatgaagtccagtggagtcaaaggaatgagaaaagacaggttaagagtacataaggtgggtccagagggccaaagctagtatggaaactgtgagggccccaagctttggaagcccacactatttattggtgatcaaacaaagaagcaggtggtgaggatgtgtggatgtgggggtaaacaggtgaggacataaggacgtgagggtagaaaggtaacagtgcatcaagtgtagctgtgacggtttagcattttctttgacacataaagagtatgctctgctgcttgagataatggagaacatatttatgagcctgggagagcaaccaacaagtctgtgcacattctagaggccacgaggggttttatgccctgagccttggattccatccaagccgtgaggggttttatgccctgggctcagatttgtgttttgtcagggcagccttccaccatttggcacagagtttgatgttccaaaggccatgagggattttagaccctggacccaggacatcttccaagactcttttatattatgacagacaagccagtcctgcctcagctcttctaccaacaccactgcacttcagcctggttgacagagctagactccatctcaaacaaaaacaaacaatcaaacagaaaaacacctgaaaatattcctaaggttactctgggaaagaaaaaggtaaataagaattattaactaatagaatatatgattaaatactaatttttgaaactcatctctattatgtcttttgtaaatattttcttatttttcagcccctactaataaaatgcaaatcacagtaaaaaatactgatacagctcagtgcagtggctcatgcctgtaatcacaacactttgggggccaaggcagggagatcacttcacaccagaagttttggagcagcctggtccctctctactaaaaacacaaaaactagccaggcaaagtgttgtgcacctagctacttgggaggccaaggaatgagaatcacttgaacccaggagggggaggttgcagtgagccgagatcaagccactgcattgcagcctgtgtaacagagtgaaaccgtcaaaaaaaaaaaaaaaaaaaaaaaaaacccgaaaaaacgaaaaaacctgaggtcaaaataagtaaagaaatcttttcaatgtacagacccaatcatccaacccatcctgttcacttacatgctcaataaccaccctcccaggagacactgctctatgccccagtgagtgccccaggtgcattttactttgtttttatgccatctcactggggtcagtttttttgtcttttggaattttttatttttattacaaaattttcactgtttttatttcactgtttttctgcccccactcaagaaaatccagggggcagaaattatttgttttgccctcaataccagcatttgattggctgaccagcaatgtgtatccaaaaaatggaagctaggttgggtgaagaaaatcttcatgtctcaaggggttagctttaaaaaaagaaaaagaaaaataaaaacaaacatgcaccaggagatgcctttcacctccaaggctgccacctgctcccttgagaggctacactccatacttcaggtggttctatgggagaaaatgacccaagagacaatagtcactagacacatagccatagccatagtgggtatcttggtttatccccagaaagtactaaaacccaggcccagaaaaaaaaaactgaaggatagctgaggacacatcaccctatgaagtttccaaagggtaatcttaacctaaaaacattctggtaagttctctggaaaaaaaaaagcaaaagagggacagatatttttacaatacagtgtcaggggattattctttgctttcttctcagggaaaatatttacaaacagaaaaaaatctcttcaatactgttatgccatgctttgtataaaatgattaattgaggaacatggggtacacttgaggcgctgcttggggcacatgtgaaaaatgccaggaaaaatcagtcccctgtgggatgtgaaaataattaagtggcaggcaattagactgaggatgctctagtacccagattcctacttctaaaaaaaaaaaaatctaaactcaagtgcattttttggtaaattactacattaggggaacaaaattcaagcttaaacaactataaactaccacttaaactctgattaaataaccagggaatttccaccttgattgtaccaattaagaaactacgtaactgcatctaaccaattattgaatttggttttcttcttcatgcaccttataaatgtcttttcttcaagaccctcccacggagaacaaactacaaactatagctagctggtctacaattcttgaatctctctttttgaggctgggcacggtggctcaagcctgtaatcccagccctttgggaggctgaggcgggcagatcacaaggtcaggagatcgagaccatcctggctaacacggtgaaactgcctctctactaaaaatacaaaaaattagccaggcacggtggcaggagcctgtagtcccagctattcaggaggctgaggcaggagaatggtgtgaacccaggagatggagcttgcagtgagccgagattgcgccactgcactccagcctgggtgacagagcgagactccgtctcaaaaaaaaaaaattatttgatatttttacagtgactcccaaaattttttttttaagacagactcttgctctgtcgcccaggctggagtgcagtggcatgatctcagctgacaacaacctcggcctcccaggttcaagccattctcttttctctgcctcccgagtacctaggactacagacattcgccatcacacccagctaatttttgtatttttaggagagatggggtttccccattttgtccaagctggtcttcaactcctgacctcaagtgatctgcccccctcagcctcccctagtccccacacaatctgggagagatgccacactgcgggtgcagagtcacctggagagggctccaggccagggcacagtcactgagcagggaagagaaaggacggccgggagcccagctgtcagcatagcggccatcttatggctgaagggtactgaggctgagctgggcaaggagaactcggaaagcagattgtggagctgactatggggaggcctgggtcctgccacagccattttcctgccaagggaggctgtgactgagcgggctacccagcctgggaaactgctttttccatggaactgtgcaacccacagttcagaagattccacttgtgaacccttgccactggagcctgagatctgaaccctggaggtgagcaattctcaacagcctctctcctagaatctgcttaagcctgccaagatcccgggggaggggtgtggggaaaagagagatcagactgctactgtgtctatgtagaaagaagtagacatgagactccattttgttctgtactaagagaaattcttctgccttgagatgctgttaatctgtaaccctagccccaaccctatgcttcctgagacatgtgctgtgttgactcaaggtttaatggatttagggctatgcaggatgagctttgttaaaaaagtgcttaaaggcagtatgcttgttaaaagtcatcaccattctctaatctcgagtacccagggacacaatacactatggaagttggcagggatctctgcctaggaaagtcaggtattgtccaaggtttctcctcatataatagcctgagttattgcctcatgggaagggaaagacctgaccatcccccagcctgacccccataaagggtctgtgctgaggaggattagtaaaagaggaaggcctctttgcagttgagacaagaggaaggcatctgtctcctgcttgtccctgggaatggaatgtcttggtgtaaaacctgatcacacattctatttactgagataggagaaaactgccttatggctggaggtgagatgtgctggcggcagtactgctccttaatgcactgagatgtttgtgtaaagtcaaacataaatctggcctacgtgcacatcaacgcacagtgtctttccttaacttatttatgacacagagatcttttctcacgtgttttcctgctgaccctcttcccaccattaccctatagtcctgccacatccccctctctgagatggtagagatagtgatcaataaatactgagggaactcagagaccagtgccagcgcgggtcctctgtatgttgagtgccggtcccctgggcccactgttctttctctatactttgtctctgtgtcttatttcttttctcagtctctcatcccacttgatgagaaacacccacaggtttggaggggcaggacaccccttcatctggtgcccaatgtgggtgcttttctttaggttgaaggtatgccagagcgtggtcattgaggacaagttgatgagagattcccgagtacatctatggtcagccttgcggtaagcttgtgcgctcagaagaacctagggtaacaatgggataaactgaaagtaaatatgcctcttagctttattaaaattcttttaagaagagggggagttagagtctctacagaaaatctaatcacgctacttcaaacaatagaacaattctgcccatggtttccagaacagggaactttagatctaaaagattgggaaaaaattggcaaagaattaaacaagcaagtagggagggtaaaatcatcccacttacagtatggaatgattgggcccttattaaagcagctttagaactgtttcaaacaggagaagatagtttcagtttctgatgcccctgaaagctgtgtaatagattgtgaagaagaggcagggatagaatcctagaaaggaacggaaagttcacattgtaaatatgtagcagagtctgtaatgactcagtcaatgcaaaatgttgactacagtcaattacaggaggtaatatatcctgaaacattagaattagaagaaaaaggtccagaattagtggggccatcagagtctaaaccatgatggccaactcctcttccagcagttcagatgcctgtaacattacaacctcaaatgcaggttagacaagtacaaacctgaagagaataacaaatagagaaagatagagtatctgtcacagcaatgccaatccaaatacagtatccacaatatcagctggtagaaaataagacccaactgccagtagcctatcaatactggccgccagccgaacttcagtattggccgcccctagaaaatcagcatggacagccaggaatgtttccagcaccacagggcagggcactatatccgcagcctcccactatgagacttaatcctacatcaccacctagtagacagggtggtgcattacataaaattattaaagcaagaaaacaaggagatatcgaggcgtggcagttcccagtaatattagagccgataccacctgaagaaggggcccaagagggagagcctcccctagctgaggccagatatgagtccttttctataaaaatgctaaaagatgtgaaagagggagtaaaaagtatggactcaactccccttatttgaggacattattaaattccattgctcatggacatagactcattccttttgattgggagattttggccaaatcatcactctcaccctctatcttttacaatttaagactttgtggattgatggggtacaagaacaggtccaaaaaaatagggctgccaatcctccagttaacataaatgcagatcaactattaggaacaggtcaaaattggagcactactaatcaacaagcaataatgcaaaatgaggccattgagcaagttagagctatctgccttagggcctgggaaaaaaatccaagacccaggaaccacttgcccctcattcagtactataagacaaggctctaaagagccctaccctgattttgtggcaaggctccaagatgctgctcaaaagtcaattaccggtgaaaatgcccataaggtcatagtggagttgatggcatatgaaaacaccaatcctgagtgtcaatcagccattaagccattaaaaggaaaagtcccagcaggatcagatgtaatctcagagtatgtaaaatcctgtgatggaattggaggagctatgcataaagctatgcttatggctcaagcagtaatgggagttgctttaggaggacaatatttgggggaaatattataattgtggtcaaattggtcatgtaagaaagaattgcccagtctcaaataaacaaaatataacaactcaagctactacaacaacagataaagagccacctggcctatgtccaagatgtaaaaaaggaaaacattgggctaatcaatgtcattctaaagttgataaaaatgggcaaccattgtcgggaaatgagaagaggggccagcctcaggccccgcaaaaaacggggcgttcccagttcagccctttgttcctcagggttttcagggtcaacaatgcccactgtcacaagtgcctcagggaatgagccagttaccacaatacaacaattgttccccaccacaagtggcagtgcagcagtagatttatgtaccatacaagcagtctctctgcttccaggggagcccccacaaaaaaatccccacaggggtatatggcccactgcctgaggggactgtaggactaatcttaggaagatcaagtctaaatctaaagggagttcaaattcatactggtgtggttgattcagactaccaaggcgaaattcaattggttattagcccttcaattccttggagtgccagtccaggagacagaattgctcaattattactcctgccttatattaaggttggaaatagtgagataaaaagaacaagagggttgggaagcactgatccaacaggaaaggctgcatattgggcaagtcaggtctcagagagcggaccggtgtgtaaggccattattcaaagaaaatagtttgaagggttagtagacactggagcagatgtctctatcattgctttaaatcagtggccaaaaaattggcctaaacaaaagactgttacaggactcatcggcgtaggcacagcctcagaagtgtatcaaagtactatgattttacattgtttagggtcagataatcaagaacgtactgttcagccaatgattacttcggttcctgttaatctgtggggttgagatttattacaacactgggatgcagaaatcactatgcccactccattatacagccccatgaatcaaaaaatcatgactaagatgggatatgtaccaggagagggactaggaaaaaatgaaaatggcatgaaagtcccaattgagactgagagaaatcaagaaagaaaaggaatagggtatccttcttaggggtggccactgtagaacctcctaaacccattccattaacttggaaaacagaaaaactggtatgagtaaatcagtggccactaccaaaacaaaaactggaggctttgcatttattagcaaaggaacaattagaaaagggacatactgagccttcattctctccttggaattctcctgtgtttgtaattcagaaaaaatctggcagatggcatatgttaactgacttaagagccataaatgccataattcaacccatggggcctctccaacctgcattgccctctccggccatgatcccaaaagactggcctttaattataattgatctgaaagatcgcttttttaccattcctctggcagagcaggattgtgaaaaatttgcctttactataccagccataaatagtaaagaactagccaccaggttgcagtggaaagtgttacctcagggaatgcttaatagtccaactatttgtcagaatttcataggtcaaactcttcaaccagttagagacaagttttcagactgttatatcattcattatgttgatgatattttatgtgctgtagaaacgagagacagattaatttattgttatacatttctgcaagcagaggttgccaacacaggactgacaataacatctgataagattcaaacctctactccttttcattatttagggatgcagatagaaaatagaaaaattaagccacaagaaatagaaataagaaaagacacattaaaaacattaaatgactttcaaaaattgctaggagatattaattggatttggccaactctaggcattcctacttatggcatgtcaaatttgttttctatcttaagaggagacccagacttaaacagtaaaagaatattaaccccagaggcaacaaaagaaattaaattagtgaaagaaaaagttcagttgcacaaataaatagaatagatcccttagccccactccagcttttgatttttgctactgcacattctccaacaggcatcattgttcaaaatactgatcttgtggaggggtcattccttccccacagtacaattaagacttttacattgtacttggatcaaatagctacattaattggtcaggcaagattacaaataataaaattgtgtggaaatacccagacaaaatggttgtccctttaaacaaggaacaagttagacaagcctttatcaattctggtgcatggcagattggtcttgctgattttgttggaattattgatcatcattacacaaaaacaaaaatcttccagtttttaaaactgactacttggattttacctaaaattaccagacataaacctttagaaaatgctctgacagtgtttgctgatggttccagcaatggaaaggcagcttacacagggccaaaagagtgagtaatcaaaactcagtatcaatcggctcaaagagctgagttggttgtagtcattatagtgttacaagattttaatcaacctattaatattgtatcagattctgcatatgtagtacaggctacaaggggtgttgagatagctctaattaaatatagcctggatgatcagttaaaccagctgttcaatttattacaacaaactgtaagaaaaagaaatttcccatttatattactcatatttgagcacacactaatttaccagggcctttaactaaagcaaatgaacaagctgacttcctagtatcatctgcattcataaaagcacaagcactttgtgctttgactcatgtaaatacagcaggattaaaaaacaaatttgatgtcacatggaaacaggcaaaaaatactgtatgacattgcacccagtgtcaagtcctacacctgcccactcaagaggcaggagttaatcccagaggtctctgtcctaatgcgttatggcaaatggatgtcacacatgtaccttcatttggaagattatcatgtgttcatgtaacggttgatacttattcacatttcataagggcaacctgccagacaggaaacagtacttcccatgttaaaaaacatttattgccaggcgcggtggctcatgcctgtaatcccagtactttcgaaggccaaggcgggtgaatcacctgaggtcaggagttcgagaccagcctcaacatggagaaactctgtctgtactaaaaatacaaaattagccaggtgtggtggtacatgcctgtaatcccagctacttgggaggctgaggcaggagaattgcttgaacctgggaggcagaggttgcggtgagccgagatcgtgccattgcactccagcctgggcaacaagagtgaaactccgtctcaaaaaaaaaaaaaaaaaaattattatcttgttttgctgtaatgggaattccaaaaaaaaaaaaaaaaaaaaaaattaaaactgacagtgggccagaatactgtttttaagctttccaaaaattcttaaatcagtggaaaattatacatacaacaggaattccctataattcccaaggataggccatagttgaaagaagaaatagaacactcaaaactcaattggttaaacaaaaagaagggggagacagtaaggagtgtaccactcctcagatgcaacttaatctagcattctatacttcaaattttttaaacatttatagaaatcagactactacttctgcagaacaacatcttactggtaaaaagaatagcccacatgaaggaaaactgatttgatggaaagacaacaaaaataagacatgggaaatagggaaggtggtaacgtgggggagaggttttgcttgtgtttcaccaggagaaaatcagcttcctgtttggatacccactagacatttgattctacaatgaacccatcggagatgcaaaggaaagcacctccacggagacggaaacaccgcaattgaacaccattgactcataagatgaagaaaaaggtcatgtcagaagaacagatgaagttgccatccaccaagaagacagagccgccgacttgggcacaattaaagaaggtgacaccgttagctaaaaaaaagcctggagaacacaaaggtgacacaaactccaaagggtatgctgcttgcagctttgatgattgtatcaatggtggtaagtctccccattcctgcaggagcagctgtggctaattatacctactgggcctgtgtgcttttcccgcccttaattcaggcagtcacctggatggataatcctattgaagtatatgttaataatggtgtatgggtacatggccctacagatgatcgttgccctgccaaacccaaggaagaaggaatgatgataaatatctccactggatatcgttatcctcctatttgcctagggagagcactaggatgtttaatgcctgcaatccaaaattggttggtacaagtacctactgtcagtaccatcagtagattcacttatcacatggtaaggggaatgtcactcaggccatgggtaaattatttacaggacttttcttatcaaaggtcattaaaatttaggcctaaagggaaacattgccccaaggaaattcccaaaggatcaaaagacatagaagttttagtttgggaagaatgtgtggccaagagtgcagtgatattacaaaatgatgaattcagaactattatagattgggcaactcaaggtcaattctaacacaattgcacaggacaaactcaatcatgtcccagtgcacaagtgagtccagctgttgatagtgacttaacaggaagtttagacgaacataagcataaaaaattacagtctttctacacttgggaatggggagaaaaaggaatctctactttgattggacttcagcgaagactccaagatggcaatcgccacctcggataccctaactcagcatttccgggttcacctttcctgttcccaccaccccgactaacgcacatgcccactagggcgtgtcacactcagaagtgtgaaactcaaccgatcccgcccctaccccgaccactcctcacccagcatccataaaagcgcgctgcacctttcgcacagcgtgacttcccctggcggaccagtgaacctcaccggagagctcaataaagaagatttttgccctctttgtcttgcctcttggccttattgatccacggtgcctttccattgcctttcatactccaagaccaaaaataataagtcctgtttctggtcctgaacatccagaattacagaggcttactgtagcctcataccacattagaatttggtctggaaatcaaactgtagaaacaagagatcgtaagccattttatactatcgacctaaattccagtctaacagctcctttacaaagttgtgtaaagcccccttatatgctagttgtaggaaatatagttattaaaccagacccccaaactataacctgtgaaaattgcagattgtttactagcattgattcaacttttaattggcagcaccgtattctgctagtgagagcaagagaaggtgtgtggatccctgtgtccatggaccgactgcgggtggcctcgccatccgtctgtattttgactgaggtattaaaagacattttaaatagatccaaaagattcatttttactttaattgcagtgattatggggtggcaaaagaattctacaagattgtggaattcacaatctggtattgatcaaaaattagcaaatcaaattaatgattttagacaaactgtcatttggatgggagataggcttatgagcttagaacatcatttccagttacagtgtgaatggaatacttcagatttttgtattacaccccgagtttataatgagtctgagcatcactgggacatggttagacgccatctacaaggaaaagaagataatctcactttagacatttccaaattaaaagaacaaatttttgaagcatcaaaagcccatttaaatttggtaccgggaactgaggcaatcatgggagttgctgactgcctctcaaatcttaaccctgtcacttgggttaagaccatcagaagtactactattataaatttcatattaatccttgtgtgcctgttctgtctgttgttagtctgcaggtgtacccagcagctccaaagagacagggaccatcaagaacgggccatgataacgatggtggttttgtcaaaaataaaagggggaagtgtggggaaaagaaagagagatgagactgttactatgtctatgtagaaagaagtagacataagagactccattttgttctgtactaagagaaattcttctgccttgagatgctgttaatctgtaaccctagcctcaaccctgtccttgcagagacaagtgctgtgttgattcaaggtttaatggatttagggctgtgcaggattactttgttaaacaagtgcttgaaggcagcatgcttgttgaaagtcatcaccattctctaatctgaagtacccagggacacaatacactgcggaagcccgcagggatccctgcctaggaaagccaggtattgtccaagggttctccccatgtgatagtctgaaatatggccttgtgggaagggaaagacttgaccatcccccagcccgacacccataaagggtctgtgccgaggaggattagtaaaagaggaaggcctctttgcagttgagataagaggaaggcatctgtccctgggcaatggaatgtcttggtgtaaaacccaatggtatattgtatttactgagataggagaaaaccgccttagggctggaggtgagacgtgctagcggcaatactcctcttcaatgcaccaagatgtttatatacgtgcacatcaaggcacagcatctttccttaaaattatttatgacacagagacctttgttcacatgttttcctgctgaccctctccccaccattaccctattgtcctgccacatcccctctccaagatgatagagataatgatcaataaatactgagggaagtcagagaccagtgctggcgcaggtcctccatatgttgagtgccagtcccctgggcccacttttctttctctatactttgtctctgtgtctctttcttttctcagtctcttgtcccacctaacgagaaacacccacaggtgtggaggggctggccacccctttagctgtgtgatagataagtaaaaacagcaccatctaattcataatgggaagggtgtttctttccataagctgttcctagagtacacaaaggatggagaattttaccaatcacaaatattttcctggattatctatccattttatatttccccatgtattttctttgttctatgcatttcttccatttggcttttcctggggtgcatcctatatattaaaccagtaaacataactacagtgtttttctgagttctgtgagtagctctaccaaattactgaacttcagggaggttttgggagtctccagttttcaaacagtgtgtcagaagtataaatgggcccatggggtttgtgactggcatctgcagtgaggacaaggttgtgggactgagccctgaatcagggtctgtgctgactctgggtggtgtcagaattcaaatgtaagacaatgagctggtgttgaagaattgtttgatgttcagcaaactacagattttgtgccagaaaaagcatatcatggaggcctggcctggaacaaaactctgagtgtctgggaatgggaggctctgctctcctgcacacaggctgtcacgctgcccgttgtcctgtgattccagctcttctcccagggtgacagaggactgaaacttacaggaaaggagctctgatgacagaccccttttctttcaactgcatccacaggattcccactcactcacaaacatacatactagacattgatgtgtccgcactcctcccaggactaggcaccaccctcaggaacttcaccatggcatttttgatccaaatgtttcttgccaagaactcacaagtgtctacaagtctcctgtcatatcctcactcccagacattgagccttgagcagcaacctgttttctccaccaacctaaggttctggacctcctgtttataatctcatctgcctgcattcacacagaaataaatcagagtacagccccacctgggccactagctgcagtgaaaatcagtccattcacctacattgcactctatcccatgcagggattttgtttttttcttttagcttttatttttggttctgtgtacacatgtgggatatacagctaaaattatgtcatgggggtttggtgtgcagattattttgtcactgaggtactacccgtagcaccaaacaggtctgttttctcatcctcttagtcctcccaccgtctaccctcatctaggcctcagtgtctgttgttctcctctttgtgtttttgtgttcttattacttaactcttacttataaataataacatgcatttggttttcactttctgcattagttttcttttatgtttttgttttgttttgatttttgagacagagttttgctcttgttacccgggctagagtgcgatagtgcaatcttgacttactgcaaccttagcctcccaggttcaagcaattctcgtgcctcagcctcttaagttgctgggattacaggtgcatgccactacccctggctaattttgtatttttagtaaagacagggtttttccatgttagtcaggctggtcttaaactcccaacctcaggtgattaccccgcctcggcctcccaaagtgctgggattacaggtgtgagccaccgctcccagcctctgaattagttttctgagaataatggtctctagcttcattgatgttattggaaaggacatgatcgttttgttttttaatagacacagagttttccatgatgtttatgtaccatattttgtttttactaaatcttttattttattttacttttttgaggtagggtctcgcttattgcccaggctacagtgtcatggcatgatattggcttacttcagggtcaagcaattctctcctatctcatcctcacaagtagctgtgagttcacatgtgcgttaccacgtctggccaatttttctttttttttttttgaggtggagtttcactctgttgcactccgttggagtgcagtgatgcgatctcggctcactgcaagccccgcctcccgggttcatgacattctcctgcttcagcctccagagtagctgggactacaggctcccgccaccacgcccagctaattttttgtatttttagtagaaacggggtttcaccgtgttagcgaggatggtcttgatcgcctgacctcgtgatctgcctgccttggcctcccaaagtgctgggatgacaggcatgagccactgcgcctgatcaatttttctttttgtattttccgtggacacaggattttgccatgttgcccaggctggtctcaaacttctaagctctggcaatccacctgccttggcctcccaaagtactgggattacaggcatgagccaccagatctgaccataccatattttctttatccaatctactactcataggcatttagggcctgtccttatctttgctattgtgaatagtgctgcagtgaacatgcatgtggatgtgtctttataatataataatttatatttctttggttatatacccaattataagattcctgggtcaaatgataattctgtttttagttctgtgaggaatcaccacactgctttttacagttgttgaactaatttacactccctccagcagagtataagcattcccttttctctgcaaccttgccagcatctgttatttattgactttttaaaaatagccattctgactggtgtgaggtggtgtctcattgtggtttttttaaaaaaaattttctctaatgattagcaatgagcatttttttccatatgcttgttagccacatatgtatcttcttttgaaaagcatctgttcatgtattttgcctactttttaatgaggttgtttaggtttttcttttaaacttatttaagtttctaataaattctggagattagacctttgtcagaggcaaaacttgcaaatattttcttttattctgtaggttgtctttttcctctgttgatggtttcctttgctgtgaagaagggttttagtttaaataggtcccatttgtcaatttttgcttttgttgcaattgcttttagtagcttcatcatgaagtctttgccggtttctgtgtctagaatagtgtttcttaggttatcatgcagggtttcttataattttaagtttacatttaagtgtttaatttatcttgagttgatttttgtatatggtgtaatgaaggaatctagtttcagtcttctacatagtgctaggtagttattccagcaccatttattaaatagagaattcttgctacattcctcttgtcagctttgtcaaaaatctgatggttgtaggaaggtggcattatttctgtgctctctattctgttgcattggtcttgtgcactcatggatttttttataacatctttgtctcttcttttttttttttttttgagacagagtttcgctctgtcgcttaggcagagtgcagtggcgcgatctcggctcactgcaagctccgcttcccgggttcacgccattctcctgcctcagcctcccgagtagctgggactacaggccacagcgcccggctaattttttgtatttttagtagaggcggggtttcaccgtgtcagccaagatagtctcgatctcctgacctcttgatccacccacctcggcctcccaaagtgctgggattacaggcgtgatccaccgcgcccggcctcttctcctttttctccataaccattctttgaagtgcatacagtgttcaaaattcagatgcccaagagttcaaaaactctttaaaaagtttgaaaacaaattttgctattctctctgcttttaagggattcagattatatgcagatatttttctctgcttttttgaaatatatgcaagcgatattaacagctaaataaatcttttgttattttttatgactccagattttctttttctggtacttcagatttattgctttgttttagcttctgaaaagtttatttttttcatttttagtcctttaaagtagacacagatttgtttagataaaagctaatttaagagcacacagaagcttagcacaaagataaaattaaatttagcaatacagaatgataaacactaaaagatactaaatttttttgacagaaacctgattatccaaggaaattatccaatatttgcagactgaagtacttatactggaaaaacaagaacagttcagtgcataaactgaacagtggagtctgtagttgtaccttgctttcaatttattacttcagaacaattagcatcattatgtgtagtgtttgtagacaacctgcattcatataaataaaacagtattttctttttttcagacagagtctcactctgttgcccaggctggagtgtagtggcataatataaagccctaccatcttggtcaggctggtctcaaactcctgatgtcatgatctaccaacgttattcttccaaagtgctaggattacaagtgtgagccaccacatctggccatataatttctacttcttttactttactaagtgtacatatttattttctaataaaattacctaagaaaggctgggcattgttgctcatgtctgtaatcctcgcactttgtgggactgaggcaggtggatcacaaggtcaagagttcgagaccagcctggccaatatagtgaaatgctgtctctactaataatacaaaaatttgccgtgtgtgttggtgcacacctgtagttccagctacttgggaggctgaggcagaagaatcacttgaaccctggaggcagaggttgtagtgagccgagatggcaccactgcactccagcctgtgcaacagagtgagactccatctcaaaataaaataaaaagccataaaaaaccctagcaaagcttaaaggatttgtttaaactgtgtattagtatgtagtataaatttgacagggcagtggctagaaaatattaaaattacagaaactctgggatttaagtttttttttttttttttggtaagcttagaaaaaacaaaactactagtactgcagtggcatagacaccagaattctatgtagggttgccaccttgccgcagatctgttcagattcaccctttttggaggacttatttagttctgatcctaccttggagtcctgcctcagataactgattagaagagatcagagttttggctggtgaatcctgttgcctttctagagctggtgcttacaatttcctgaaagccaaaagctgataaatgggataaataaggtatatattttagggtgctactatttaaatgttctattaaaaccagtgcttgcagagacattgtatttagaaacttgttttctatttctgcagatacagtacttgctccataagtcacaaaaaagtaaatataaacagaataaaatcgtgtctaaactacattaacctctttttatatctgtttcatctgcctatatttagcttttattctttataattttttaaaaaatttgatgacagagaaacacaagaagaaataaaaatgctgggccctttatctaaatcctggaaattattaaacccttagtaccagctcccatggtgttatgagaattaaatcacataatgtgttatgcccagcacagtgctctgtatcacactcttgagcacatagtacctgcttaataaacattgcattagtacatgtgtacatgttgttttttaaatccagacttattcagacattgctgcattctgtttcctctgtaaactttaaagagccagcaaagaatataaaactttaacatggagatggattgttcttgtttgtaccagaagtatttggttgcaacaagagtgctgagtgtaagggaccctgtgctgtgcctgcttctgtaactaatggtaataatgaaccaatggggagcaacaccagcatttataggggattgtttaaaacacccattcatggacgcttttcaaacctgcagaatcacattacataaagtggggccaaaattaccaagtgatttataggctctttaaagcttgagaggcaataattagcttagggattatcagcccaggcttctcattaggatcaaatggccaatttgcagaaatctcttgtgccctccccacagcttctgtttattgttctgggtggaagcatccatgttgttttaatgaagggcctcatgtgaatctgaggtgagaccagaatctggtatgaggatttcaaaatacattcatgagagttaagttccacctttggactaaagggtggtcacagggcctgttctctttgggtttagtagggacaggtcagtgtggtgcatatttccattactgtagcagaaattgctggtgtctgtggcaggggagggcacctcaggacaggaaaggagaaacttatattttcatcttcatggagcagctcattgtttctgaatctcttctgttttaaaggacagaaatgggtggatttttctgtctttttctgctggttgatgttacgctagctggtaaacatgtggcactgacacctttaaaggcatattctcaagatgcaggggtaatttttttagagaatctcatctgagaaggaattccagagaagtaggagatagaaaaaacaaaaaaggcttttcttcaggtaaacatgcctcagctgaaatgctgtgtccactctgcctcctggaatgccatgcatttagtacttgcaaacttttatttctctacttgtgtttttccttcctaagtagtttggtttaagtacttcttaaaattcttatgatagtcaagggtctctgaaaaatgtttctttcctgtatcccagagccttctcttctttctctacacaataacttcttatatgccatgcagatttttcaacaagtattcatgatttgcaatattaaaaatgttccctttctggctgttgaacatggaaagatgtggatactcaagatttctattggggaaaactgtggtccttagtaaagatggagaacatgtaaagttgaggctctattcctgtgttccattagctgtatgcagaacaggattaagaaattgcttatatatgtcaggtgtggtggctcatgcctgtaatcccagcactttgggaagtcgaggtgggaaggccacctgagatcaggagtttgagaccagtctggccaccatggtggaaccctgtctctactaaaaatacaaaaattagccaggcttgttggcaggtgcctgtaatcccagctactcatgaggctgaggcaggagaaccacctgaacccaggaggtggaagttgcagtcagccaagattgcaccattgcactccagcctgggggacaagagtgagacttcatctcaaaaaaaaaaaaaaaaaaaattgctcatttaaatgtgatggcatttattactcagaaatttctgaaaaaaattattaggagatacctgctctctagggtgctaaatgaagccgacttaaaattactactaaaaattacagagcataggatttatctgtattttgtggtttccataaaacaaatgattctttatgattaaattcagattttacttacttttttaaaagaggaatatttcaacagtgatgctgtgttctgtgtgcattagcacatcataaaaattagtcctaatgcagttaatgattcacttgcttaaatagccctctggcagattttttcactatgtagctagttatttttctcttcattattaagtatgtttatgcagctgatgtgcataaaccatcacatttaatctggcagctgtccttttttcttatttttatctatatatttttctttggaaaatgaaggttcttatctttgtttacaggtcagaaaaactgggaaaaacacaggctcttccacttactggctgtttgacaaaatatcctccttctttggccaaaaacattgacattattgatgagcttgttagaaattcaaaaaatcagactttattccagatcttctggaaaaaaaaaccctgtataacaaggtattcagcttattgcacatattaaaatttgagaagtgtcttctaactcaacatgtcattttcatctgaaaaatattcacaactctttccatatgatgtaaatatagcactcaaaaatgtacctgttcatgttcatgcccttaaatttatactttattatctagaaaaatatatgaactgatgttgtggatcttatgcttctcttttttctcagagttagagaatattttggagagtatttctgtgttgaaaattattttattggataattttcatcagtactataagtcagaaccaggtgtctttactctctcatttcaccttaagtcaaattaaaaatttcattcatggtcacttggtgaaaatgtgtgtgtgtatttttcagaggacattacaattcagagatgtggccatagaattctctctggaggagtggcattgcctggacacagcacagcggaatttatatagggatgtgatgttagagaactacagaaacttggtcttccttggtgaggacaacttgaatatataattcataatatacacaaaaggtttatttctcttttttgtagaatgtgttttagtaatttgttctttttataaatgagtttcagatccagtttttcaagaaaatcttcagaatttgtgcatttagaaaagaattacttccgtgcctcatgcctgtaatcccagcactttgggaggctgaggcgggggattacctgaggccaggagcttgagaccagcctggccaactaacgaaagtacaaaaaattagctgggggctgtggcacacacctgtaaccccagctacttaggagggtgaggcaggagaatcgcttgaacccaagaggcagaggttgcagtgagttgagatcatgccattacactccagcctgggtgacagagcaagtttccatctcaaggaaaaaaaaaaaagaaaaaaatttcttcaacatgtttcatctaaatataaactttccacatttctgagttgagttgtatttttcactctaaattagtggtaattccagaaatttattgacataaaatattgcaacctccctctcccctctcccctctgcctctctttccacggtctccctctgatgccgagccgaagctggactgtactgctgccatatcggctcactgcaacctccctgcctgattctcctgcctcagcctgcctagtgcctgcgagcgccgccacgcctgactggttttcgtacttttttggtggagacggggtttcactgtgttggccgggctcgtctccagcttctaaccgcgagtgatccaccagcctcggcctcccgaggtgccaggattgcaggcggagtctcgttcactcagtgctcaatggtgcccaggctggggtgcagtggcgtgatctcagctggctacaacctccacctcccagccgcctgccttggcctcccaaagtaccgagattgcagcctctgcccggccgccacccagtctgggaagtgaggagcgtctctgcctggccacccatcatctgggatgtgaggagcccctctgcctggctgcccagtcggaaagtgaggagcgtctctgcccagccgccatcctgtctaggaagtgaggagcgtctctgcctggctgcccatcgtctgggatgaagtgaggagcatctctgcccggctgcccatcgtctgagatgtggggagtgcctctgccccgccgccccgtctgggatgtgaggagcgcctctgccccgccgccccgtctgggatgtgaggagtgcctctgcccggccgcgaccccgtctgggaggtgaggagcatctctgcccggccgccccatctgagaagtgaggagaccctccgcccggcaggggccccgtccgggagggaggtggggggggtcagccccccgcccggccagccgccccgtcctggaggtgaggggcgcctctgcccggcggtccctactgggaagtgaggagcccctctgcccggccaccaccccgtctgggaagtgtacccaccagctcattgagaacgggccatgatgacaatggcagttttgtggaatagaaaagggggaaaggtggggaaaagattgagaaatcggatggttgctgtgtctgtgtagaaagaggtagacatgggacacttttcattttgttctgtactaagaaaaattcttctgccttgggatcctgttgacctatgaccttacccccacccctgtgctctctgaaacaggtgctgtgtccactcagggttaaatggattaagggcggtgcaagatgtgctttgttaaacagatgcttgaaggcagcatgctcgttaagagtcatcaccactccctaatctcaagtacccagggacacaaacactgcggaaggccgcagggtcctctgcctaggaaaaccagagacctttgttcacttgtttatctgctgaccttccctccactattgtcctatgaccctgccaaatccccctctgcgagaaacacccaagaatgatcaatacaaaaaaaaataaataaaaaataaaaataaataaaagattaaaacacacacacacacaaaaatattgcagcttccacctgaaaatctaattgccaccaccaatttttgattcagtagtaccaggcagtaaaattaagaaacctacaaattgaaagtattttcttttttttttttttgagatggagtcttgctctgttgcccaggctggagtgcagtggtgcaatcttgggttactgcaacatccacttcccaggttcaagcaattctcctgcctcagcctcccgagtatctgggactacagatgcacatcaccatgctgggctaatttttgtatttttagtagagatggggtttctccatgctggccaggctggtctcaaactcctgaccttgtgatctacctgtcttggcctcccagaatgctgggattacaggcatgagccactgcaccaggcaaattgaaaatattttctaaatatttagaaattgctgttataaatttgtattttggtattaatttaccagaatattttgtcacatcgtctttgctgagcacattactagcttgtaattggagaatatgagcaagattcatgttatttatttttgataaaacaggtattgttgtcttaaagccagacctcatcacccatctggagcaaggaaaaaaacctttgactatgaagagacatgagatggtagccaacccctcaggtaggtgtgagtgaaaatgaatacaacagatgacacaggtaagaggtcccaaggtgaaagagaaagccagtccttaaagtgtgattcaggaagctgtgttccaaagaaatacttcctgggcagctgttttatttatttatttatttattttttaaattttgctctcacaaaggggcatcttctgtcttatgcttttaaattctctaaaaattctacttttctttcagtgagcttccttcaagttcacagtgagagccaaagtcctcttcatggcatataagagactgcacaatctggctgctttttcattgttttggggacacacaaatatctgcatgattttgagaaactaaaactattttttagttctctttttgcatcaggtctgaaatatgtgagagtagtagtttctgttgcatttttttgttcatttttgttcacagtccattctatttttattatgacacagtcttgaaatatagtttgaaattttaagtatgatatccttctgctttgttctttttcctcaagattgctttggctattcaaagtttgttttagtttcatgtaaattttagaattgtcttttccattactgtaaaaaaaaccactgcaattttgatgggaagtttattgaatctatagatcactttggataatatgaaactttaatgatattctttcaatccgtagacataaatattttaaaattaattttgatcttctaatttttttatttttttactgtaaacattttttacctccttggttaatgtttttctcagaaatttgttatttaatgctacattaaataagattttttcttccttatcagatagtttgttttaagtatatgaaaccatacatatacttgtgtgttaattttatattttgctaatttactgagtttatttattagtttagacaggttttaatgtactgtttatggttttttaaatataggattctatgatctacaaacagcaactgttgacctatgtttcttcatctgaagaaatccataattttagattcagatatttaggacaatatgctagaatgttcatggtatgcctgaagtaaattagataatttgtagggacccatatttactaaactagttacttatgcatttaagtttgctgcaggcaaaaaggaattataggatttttatttatttatttatttatttatttgtttgtttattttcttttgagtggggctttcactctttttgcccaggctaaagggcaatggcgtgattttggttcactgcaaccttcacctcttgggttcaagcggctctcctgcctcagcctcccgagtagctgggattagaggtgctcaccaaaacacccagctaattttttgtatttttttggtagagatggggtttcaacatgttggcaaggcttgtctcaaactcctgacctcagatgatctgcccacctctgcctcccaaagtgttgggattacagccatgagccaatgtgcccggctggattttttcatttctgtgaatactggtacaatacgcatggattttcagttatgtcttccaggtcctgtgttgcatattttgtttttttgttattgttgttttcttttcttttcttttctttttgagctggagtctcactctgttgtccaggctaaagtgcagtggtgtgatcttggctcactgcaacctctgccttctgggctaaagtgattctcttacctcagccttccaagcagctgggattacaggtgcatgtcacatcaccaagctaatttttatatttttagtgaaatggtatttcaccattttggccaggctggtctcaaacctctgacctcaagttatctgcccatatcaggctcccaaagtgctagaattacaggcttaagccactgcacctggcctgtgttacatagtttagatatagatttataaatgaggaacatttataacattttaaaataatggctgcgtctttgttttccaccagcaatcaacattggttttatttttattgcacctaatgggtgtgaggtgattttgttggcattgtgcttttttttgatttctctacaaattagtaattttgtatgttctttcaaatgtttttttcccttttgtgcattttatgtcttgtatttagtttaaaatatattattgtatcattcaaggaaataatccaactttattttatcagtgttgacattcagttttcaacatcattttttgaagagattatttctatttcatatgcatggcaactttctggaagattatgtgatcatatacagaagggtttatttctgggctctctattctgttctttcatctgtttgtctttgtgtcagtatcacttttttatgttactgtaggttttaactgtaggttgtattgacatctttgaaaaataaaatattttgcccctgagcaagaatatgttgaagagtgtgtttcatattcacatatttgtgaatttgccagtttgacttttgcttttaattcttaatttcattcagtttttgttagaaaacacacagtgtataattttagtgtttctaaagtgattggttgttgttttgagacaagatcttactgtcacagtggcataattgtggctcactgtagcctcagactcctgggctcaagtgattctttcttttttttaaattttttaaatttttttattacactttaagttttagggtacatgtgcacaatgtgcaggttagttatatatgtatacatgtgccatgctggtgtgctgcacccattaactcatcatttagcattaggtatatctcctaatactaaagtgattctttcacctcagttttttgagtaggtaggactgtagacatgcactaccatgtctggctaattgtttacttgtttgtagtgttaggatctcactatgatgcccaggctgttctcaaacttttggcctcaatggatctccaaagtgttaggattataggcaagagccatggcacccagtagatatttttaaatttaataaaacttggtatatgtcctaacagaatacaccagaagcaaataagaatattgtatattatcttggttttgactggagagttttgtatgtgtctttgaaccctagttggtctataatatggtttggatgtccatgttgtccaaacctcatgctgggatataaatcttcaatgttggatgtgggacctggtgggacttgtttgggtcatgagggtgaatttctcacgaatggcttggtacatactcttcataaccaaaaagtttacactctatcaattcaaataagagctggttcattaagagaacttggctccttcacctcacacttgctctgtctcttaccatgtaatatacccagttacactttaccttccaccatgattttaagcttcctgaaatcctcatcagaagcagatgctgacacacacttcttgtacagtctggtgagctgtgagtcaaataaacattttttctttataaattatgcactctcaactattcttctatatgtaaaataattaatatggtctataatgttatctcagctttctttttcttattttttatctgagttttctatttattattgcaaatggggtcttgatgtctacaatgattatgttgctatgtatgtcttgcttcacttttgtcaatatttgctttatatattttgaagccctgatgttatatacacatatacatagagatagataagtagtatagatccctgctaaatcaactcacttttgccataatataatatcaatcttttctcatggtagtacttgacttaaagcatattctgtctaatataattatgaccacctcactcaattgtggttactatcttcatggaatataactttttttcattctgttaatttcagcctatttgactcaatgttaaaatgatctctcataggcagcatagtgtatactttttgaaaaaccattcaggcattctatatctttttctttatataattttatttatatgttcatttatttattcattttatttaattttattttttgagatagagttttgttcttgttacccaggctggaatgcaatggtgcaatctcagctcactgcaacctttatttcccgggttcaagcaattctcctgcctcagcctcccaagtagctgggattacaggtgcatgccaccacacctggctaagtttttgtatttttagtagagatgtggtttaccatgatggccaggatcatcttgaactcctgacctcaggtaatctgcccacctcggcctcccaaagtgttgggattacaggtgtgagccacagcacccggcctcagaggcatgatcttggtcactacaactctgccattacagagtctcactctgtcacccaggctggagtgcagtggcatgatctcagctcactgcaacctctgcctcctgggtttaagcaattctctgtctcagcctcctgagtaactgagattacaggtgcctgccaccacacctgtctaattttttctgtttttagtggagatggagtttcaccatcttggccaggctgcttttgaacttctgacctcatgatcaacccatgtcagcctcccaaagtgctgggattactggcgtgagccattgcgcccaaccagcaatttacttttaaagacacaatattatactggagagcaggaagagctctgttgggtataagtaacagacttttctttttcttctatgtggctctttgcattgtgctcacctggggcccttcatccatttaacccatttataaattttttacaaatgtattttggtcagtatgtttttgttacctttatatgtccaggaagaaattacagcttgtggtattttgctatgtcatcttgcttatgtagtttgtataattttataggttagatttgtaaagtatatttatctgagtctagcaattgaagtaatgtgtttttattgtttctttcagttttgtgttctcattttacccaaaatctttggccagagcagagcataaaagattatttccaaaaactgatactgagaagatatgaaaaatgtggacatgagaatttacagttaaaagaaggctgtgaaagtgtagatgagtgtaaggcgcacaaaagaggttataatggacttaaccaatgtttgacaactacccagagcaaaatatttcaatgtgataaatatgggaaagtctttcatcaattttcaaattcaaacagacataagataagacatactggaaaaaacttttcaaatgtatagaatgtggcaaagctttcaaccagtcctcaaaccttactacacataagaaaattcatactggagagaaaccctacaaatgtgaagactgtggcaaagcctttaacttctcctctaaccttactacacataagaaaattcatactgaagagaaaccctacaaatgtgaagaatgtggcaaaaccttcagttggtcctctattcttattacacataaaatgattcatactggagagaaaccatacaagtgtgaacgatgtggcaaagcttttaaccattctgcaactttttttcgcataagaaaattcatattggagggaaaccatacaagtgcgataaatgtggcaaggcctttatttcatcctcaaaccttagtagacatgagataattcatatgggagagaaaccatacaaatgtgaaaatgtgcaaagcctttaagcactcctctacacttaccagacataagatagttcatactggagagaaaccctatgagtttgatgaatgtgggaaagcctttaaccagctatcaacttttactaaatatgagaatttatatggaacataaaccctacaaatataaagaatgtgacaaaacttttaggaagttctcaacccttattatacagaattcatactggacagaaatcctacaagtgtgaagaatggggcaaaacctataacaggttttcaattctttttggttttttttttgagatgaagtttcactcttgtcacccaagctggagtacaatgccacgatcttggctcactgcaacctccgcctcctgggttcaagccattctcctccctcagcttccctagtagctgagattacagctgcctaacactatgcccagctaatttatatatttttagtagagacacgattttgccatgtttgccaggctggccttgaactcctgacctctggtgatccacctgctttggcctcctatagtgctgggattataggcatgagccacgatgcccagccacaagttctcaattcttaggagacttggtgataattcatgctgaagaggaactctacaaacctaagaaatgtgactgacagagtttttaccaacacctccaacttctctatacataaaaataattatactagtgtgaaaacctagagatatataaaatgtgacaaagcctttatatggttgccacactcgattgtagttaagataattcatattggcaaaactcctacaagtgtgaaaaatgtggcaaaacttttcatccgttcttatactttatttcacaggaaagctagtatccttgagaaaaattgtacaactataaggaatatggaaaacccattaattcctactcacatcttactcaacataaaaaggttccttttaataaaagcattaaaagtgcaattacagtcaagaaatctttcagaaagtataagcatttaatgtgaagaagagtattgtgaagacaactattacaaatataaagggggttatagtacatttacttgtatcactgatcctattgcacacactttgcactagaggaaaaccttgaagcagttgctcaagctttgttcaacaacagggaatttatattggagatgagtcctgcaaatgtaataagcttagaaacacttattttttttttcagaaactacagcttagaaaacaccagagagtttataccaaaatataattttgcaaatgtggtaaatataaaaaactaattcaaaatagaatgtatttaaatatcagagaatttacagtagaataactaaggcactgacacttcagacattacactaaatcagagtgttgagtataaaaactaatccacaactacagtttttagataaatgatttgcatgtaactgtaaaaggagtagatttttggaagcattgtaattacattgaaagtatacttgtttccttgaataaaattttttgaaaactgcataatgatgtcatacagcttttaaattactttacgctgttattttactcttattcacatgtgaaaggacgtgataaattgcttctgcatcagagatattagagatttttgaaaattatttggacattatgactttttctataaaagagtaaggacattaaaatgtaagatgcataatgaaaatataagcggagaggctttttgtagtaaacctctattaagtaatgtataaggtaaatgttcagagcaatacttttctacattatagtgacataaataattatagttaaaagtatattaaaataaattagtatattattttactaattgtagttttatgtaataaaatgcagtacatctaacaattgttagggctgggctcaatggctcaaacctgtaatcccaccaatttggggggccaaggtgggcagatcacctgaggtcgggtgttcgagaccagcctgaccaacgtggagaaatcccgtctctagtaaaaatacaaaaaaattagccagccatggtggtgcatgtctgtaatcccagctactcaagaggttgaggcaggagaatcgcttgaaccagggaggcagaggttgtggtgagccgagatcatgccattgcacaccagcctgggcaacaagaacaaaactctgtctcaaaaaaaaaaaaatagttagattatgtgtgaactcaattttattattattttttaccatgttaatactattgtgcatttaatgaagcattattatgccactaactttaacctatcccaccttactcaagggtgtagctacaagatggtagcaacatactatttggtacatagtggaataacatctctagttatcactttgccagtggcattaaactgcaaaagagttaaagaatattgttcccatagattaaatttttactcttttttcttatcaaaatttgttattgtatttgtgggtatatagtatgtgtatgtatttatgccttatatggcatattttgattgaggcctacaatatgtagtaattacattagggtaaataaggtatccatcacctctagcgtttatcctttgtattaccaacagtataattatatgctttcattattttaaaatgtacaattaaattgttattgactacaggatttttttatggtcataataattatacaaaaatataaataaaatacagccaggtgcagtggctcatgcctgtaattccaacactttgggagaccgaggcaggtggagtacttgaggttaggagttcaagaccaggctggccaacatggcaaaaccccacctctactaaaaataaaaaattagccgggcatggtggcacatgcctggaggctgaggcaggagaatcgtttgaacgcgggagatggaggttgcagtgagccgagatcacgccactgcactccagcatgggtgacagagtgagactccatctcaaaaaaaaaaaaaaagaagaaatacaaataaagtccatacatttctgagtcctgaaaaataattaataaatatttgtcatatagttttctttgaacatgtggtctctctgcctgcaagcatatagacttttagttttaatttacatagagttaaatatactcatattactctgaagataaaccttaggtgtaagaaaaatataaagtgagtgtttttgtctgagtatgagtttgtacacattttcagaagcaaagagcaattattgcaacaaaggaaattattttaattaggtgactaactaaacaccttgaaaatgctgaaagcaaatctatactttctgctttgtattcagtttattaatgtaaactgttaaggcttatgattcagattctccccggaatctgcctattaaagcacagacaactttgtctccagaaacaacactcttgagtacaacaataaaacccctcttcaaacagaaaaaaaaataatttttaacaattacctttataaacattcaacaaaattaaataattggatatatttttattgttctgtgtgtgtgtgaatgtataaaatggtgcatacaggaaaaataagccagaagaaagatgttagttaatattcacagtgaataaaactggaaagtagttaattattaaatccagatgatagctttgtttatgtagataacaaaagcagcagaaagacttttttttttcccagatgaagtcttgctcagtcgcccaggctggagtgcagtggcatgatctcggctcactgcaacctccacctcttgggttcaagcaattctcatgcctcagccttttcagtagctgggattacagtccgtgccatcattcctgactaatttttgtagtttcagtagagacagggtttcatcatgttggccaggctggtctcaaactcctgacctcttgatatgcccacatcagcctcccacagtgctggtattacaggcatgaaccaccgtgaccggcaaaatactattttaaaagtttatttaggtggatagacaacattctaagataataccctggattctcagtctgttgcacacctgctgtgtaatactctcctcttgagtttaaaaacatgtgtgactgtggtgggaaatcattcatgatattaggttactcatgtgttaactttgtgtttatcaaaatggagattatccttattgtgctaaacttaatcagaggtgcttttaagagaaagagacacatcacagaaaaacacccctgctggcctgaaagtcagtgacttcttcgtggaacatgtaagctgcttatggtggccatatggcgggaaacatgtttgtttattgtcatcattcctgcctcctgtatgttgattccagtaaggagaataagaggatcgtatggcagaggggaaaaaaaggactctcattcatgcaagaaataaacacctctcacctgggatagcttaagagaaacaggagaccacaacaggtccacattaatgggaggaaaagggtaacctgggtaaaagtgctcactggcattatggaacagtatttagtaagctgtagtgaatgatcagcctctgggataccaatagtctaccaacaaggctgaactcattctatttcaatcagcatgtctgcaccattctggcgacccaggtttacactattcattgaagaaataccatgaagaccagtgggtaatgtcctagaattgaacttacttcaaaaagcatacctaattgtttgtttttacatttgaaaaacttttaaaacaatgaacttataattaacttctaattacagaagattctactgtactgttacatgattaaattgtaaacaccttaatatgaagattttttgaatgcatgattagttatgtagatagtttcttttagagtcacatgaccaaagtaacaattagagaaaacatttgaaatgagacaaaattaaccaaaaccacatcttttcaaaggcttggcataattgccatatttatggaaatggccagatgactaacaagaaacaaaaagattttggctttgctcaatgattgtttttgaccttttgaaatctaaaatcctggctaaagtattcaaagggaatattttgtaggtggcttcccagggtttccaagtaaatgaaggagggattctctctctgtcacccaggctgcaatgcaatggtgcattctcatctcactgcaacctccacctccctgattcaagcaaatcttccacctcagcctcccaagtagctgggataacaggcacctgcccttatgcccagataatttttgtatttttggtagagatgaggtttcaccatgttaaccaggcttgtcttgaactcctgacctcaggtcattcacccaccttggtctcccagagtgctgggattacaggcatgagccaccatgcccagccggaagaattttgataggcagaaaaatgcagattatatacactcattgctctactctgatttgcttcaacgctgaaaaattgaagattgtaaatgtagtctcaatttagagaaaattatcaaaatatttatttttcaaaaaagcaaatgtataaaattaatgggtatcaggtgtcattagctgctaaaaaaatagtatgactaaatttagtaagtatctagctatgcaaataacagcctaattaaattaacaccctaataggtgcatgtggaaagcattgctgtgcactgtggtgcacccagactcagcattttcttctgcctcttcacagagataccaattccccctgagttactcagtgtccatactgttgttagaaatgcttgttctctggtgccataaagaaatagtacttgaaaataaatttaattttcttagcaaggccattctttttgcaaaaagggcacactcaccagcagttttgctaccagagtacactgaacaaaagagacagggtcatttataacctgatgtgtccaccctacttttatgtttggtttttattggctgaaaagagacttcacattctgtatttttcccgattgtttagcaacttagaactttttttttttttttttttttttttaagacggagtctcgctctgtcgcccaggctggagtgcagtggcgggatctcggctcactgcaagctccgcctcccgggttcacgccattctcctgcctcagcctcccaagtagctgggactacaggcgcccgcaactacgcccggctaattttttgtatttttagtagagacggggtttcaccgttttagccgggatggtctcgatctcctgacctcgtgatccgcccgcctcggcctcccaaagtgctgggattacaggcgtgagccaccgtgcccggccaacttagaactttttaaaggaggcaaatgcagaggagaacaaagaaaggaggaagtaacttgtggaatgctgagacaggtaaaaacaccttcaaataaggaagagtaacaggctgtgacctaatgcttgcttggaccagtataagcatgccaaggcaaatatttaggctaaattatggaagctaagaacataaagtccattgatttttttgttatggctagcagatatttaagaatgttagcacaggtctttgaataaactttgcttctaagagaagttactatttattcctaattagacggggaggaaagtctttgaagaggaacctctacttcactttttatactgggaactgagaatgctgtgttcagagtgattaccgaaaacatggttaatacacttcttccatatgataataaaatgttataaatcttactctgcctcagaaaagcttttactaaaacattatctatagtactcaattagagttcatggaaaatttcaatattccaaataattcagacagttaaatgtcaatgaaatcccataaaacatttgaataagataagtcttcttagcaaataattttatattactggtaaatttagaaaaaaaaaatagaaaaccaggccaaatgtggtggctcacacctgtaatctcagcactttgggaggctgaggtgggtggaaatcccatctctactaaaaatataaaaatttgttgggcgtggtggcacatgcctgtaatcgcgggtattgagaaggctgaggcaggagaatcgcctaaacctgggaggtggaggttacagtgcgtggagatggtgccactgcactccagcctggatgacaagagcaaaactccatctcaaaaaaaaaaaaaaaaggatttttttttgtttttttttttctgtgttgacttactttacttagcataatatctttcaggttcatgaatgttgcaaataacaagattgtcttactttaggggctgaatagcatttcattgtttacatacaccatattttctctcttcattcacttcttgatggacacttagattaataccttagctattgcgagtaatccacttctttccttctcttttgtttttgtttcgttttgtgtgagacggcgtctctttctgtcgcccaagctggagtgtagtggcatgatgtctgctcactgtaaactctgcctcccaggttcaagtgattctcatgcctaagcttcctgagtagctgagattacaggtgtgtgccaccacaccaggctaatttttgtatttttaatagaggcaggctttctttatgttgaccaggctgcctttcatttgtttgtatatttctttctccctttccttctttatttctagaagtattttacttttaaaatataaattatgactgttataaaccttcatttctctgtctttgcttactattatggctgattaaaaataagttttttgaaatttcctggataaagttattatttcattattaacataacgagaaaatatagaaaggaaaaccaacatttgttagtaaaacagaaattatctagctactggtagtgatttagtctctcacccaacatgaatgctacatcttggtgtcatctctcccagtcgtatgaaagaggctactgatcaaattggtcagcataaaattttgtgaagtttaacacctttgttctaaaaattaagctgatctattaccaaaaaagtagattttttgatatgtataatttgactctatttaaattccgcagaaaaattaaactgacaacatatatttaaaagttttttgagggctgggtgcggtggctcatgcctgtaatcccagcactttgggaggccaaggcgggtggatctcgaggtcaggagattgagaccatcctggctaacacggtgaaaccccgtctctactgaaaatacaaaaaattagacgggagtggtggtgggcgcctgtagtgccaggtactcgggaggctgaggcaggagaatggcgtgaacctgggaggcggagcttgcagtgagcttgtgccactgcactccagcctgggtgacagagcgagactccatctcaaaaaaaaaaattttttttggaaattaaaaatgcttaagaaacatatttatagaaactaaaagtaaaaataattttagattcttagagaacatctctaaaatacttcaagttatcctctgagagtatatatatatatatatgtatatatatgtgtgtatatatataaacacacacatatatatacatatatatatatatatacatatgcatgcatatttttttttgtttttttctttttttgagacagagtttcactcttacccaggctgaagtgcaatggcagaatctctgctcactgcaacctccacctcccgggttcaagtgattcttttgcctcagcctcctcaatacctgggattacaggcactcaccatgcctggttaatttttgtattttcagtagagatggggtttcactatgttggccacagtggtctcgaactcctgaaatcaagtgatctgcttgcctcagcctccccaaagtgctgggattacaggcgtgagccactgcccagccaagtgttcaacttttctgcatcaattatctcagctcagaaaatttaaatcagccaattagcttacctcaggggattccaagcagctcattagcactccccaggagaatccaatcaacaaattagcttagcccagctgattagcccaggtgatttcttttctttacttttctttttcttttttttttacaggaacacagatttgatgttttaataaaaaaaaaaatacgatttctgcaaaaggtgcttaacacggcccaggacgggctgtccggtggagtcagccctaggacccctgaaggatgcataaagacagagccggctcgccagcacgctcctgccagcaccgggacccactgcgagccactgcggggtgtccttcattaaaaaaaagtctggattgtgacattgcaaaaggagtctgaaagccatatgcccaattcctgaatccctacgttagaactgagagtttaggctgggcacggtggctcacgcctgtaatgccagtattttgggaagctgaggcgggtggctcacctgaggtcaggagttcaagaccagcctgaccaacatgatgaaaccccgtctctaataaaaacttgcccgtaatcccagcactttgggaggcctaggtgagcggatcacgcggtcaggagatcgagaccatcctggctaacacggtgaaacaccgtctctaataaaaatacaaaaaaaattagctatgtgtggtcatgggcgcctgtagtcccggctacttgggaggctgaggcaggagaatggtgtgaacccaggaggcggagcttgcagtaagccgagattgcgccattgcactctagcctgggcgacagagtgagactctgtctcaaaaaaaaaaaaaaaaaaaaaaaaaaaaaaaaaaaaattagctgggcatggtggcgcatgcctgtaatcccaattacttaggaggctgaggcagaagaatcgcttgaacccgggaggtggaggttgcagtgagccgagatcgcaccactgcactccagcctgggtgacagagcaagattccataccaaaaaaaaaaaagtgagtgcttagctggagtgaggaggaaatactgaattcctaggtcaggaattcatttcattttcaccaagcgcagatatcccagctcctgaacaaggccaagaccgagggtctggcaccgggcacgtgtaagaaaggactgttttaagaaccttattacacaaagctcttatttctggatccaccactgcttacatttgcacccagacaccacttctaggtgcaagaagaaagatcaggacatagagaaaaatgcacacagaacgatgagggaggatgacgagggagaaagcctgcatcagagcactagcccagatgatttctaacagccaactagctttttctaggggacaccaatcagccagttagctcagctgatgtgaatcttataacccgattagtttagcacaggtgattttaaaccaccgattaactcagctcaggtgatttcaatcagcgaattagctcagcccaggtgatttcaatcagctactttatcaacccaggtgaattcaattagccaattagctcagtctaggtgatcccaatcacctaattatctagtggctacagattcattaaggtatgcccaaaattgtaaatgtaaatagcccatgaacaccaagaagaaatgcagggccctatatgctaacctggacagtatgtataacacagctttactgtcactttatttacaaggcctgaaacctgaagctgaagctttacgtttatataaacaacactgtatggctatgtttcattctgacatgctattgagcaaaagagaaggcaattaattctgcatctgcatccttagtatatgctctatattttaaaaagtgggaaaatattgtatgtatacattaatatttacatagatacattcatataagtttgtgagtgtttatgtagctaccatatgtgtacatatattcatacacatacctaagtgtatataaatatatatatgaagctgtaacaatttttgtatttatattcatacaaaataaagatgttgaatgtggaagtattgatagctattgctacaaacagtaatacagaaccttccatacctgtataaaaatattttctctatagactactatatctagaatagtacagaaatagaggaatgctctaatatacatcctgctgcagttaatatattcaaagggagcattgggctttgttttgcacttctggaagatgaaaatttactaagaccattggagttatttactgccatgtcagggttgacttttcttttattgttgtacatagggtcagagatgaaccagccccagtccaaaggtctaacctaaatatgagaatacttattctttctctttagaacttccatcgaacaagaactgtatttatttccaaaagtgtgtgatgtaaaatcacactattgtctttcggtctttgtggcagaagttgggtatttatggtaatgaaaaagaagtctatgtctctttttagaagacagatggtgatggaagcaaatataatggtacatggtacttggccacatttcaaatgggtgatattgaatagtcgctgaagtgccacaggtggcttttatttcccaggtcaaatcttctttgtgaggaaggctcagcccactgttgtcaagcatttctggtaatttctagatagatgaacaaaatttcactgggctggattaatgagaccaggtttaaaaacacccaggttccaggttattaaagacattgttaaatttgtattaaaaaaagtggcatggtgtgcggcttggtttgaataaatcttcactgagctcagtagctgattacctaacctgtaggtaaaggaattggaaaaacctctgaccaagtttattttataggcttctttctgtacatgtagatataaaataggtggctagataaacatatacacatgaaatgagtcacacgtgtatgtctacgtaatgtttatttctgcatatgactctcaaaaaaaaagcctcaggaataaagtcagatgacatctcggtaagctaccctgaagctgaggtaaatcaaataagcaaattagcagaagtcgggtgattgcaatcagtcaatttgcacagctcagatgattccaaccagcgaagtagctcagcccaggtggatacaatcatccaattatctaaatgatgactggctttgtcaaggcaggacccaaatggtggatgtgtacagaacatgcacacattgaggagaaatgcagggcgctgaaatactaacatggacagatgtgttgtacatggctttattttcagcttctgtggtcttgcccttgaagataaagctttgttgatatttacataaaaaacattgtatgaatatgttccattctgacatgttatttagcaaaagaaaaaagaagtaattctacatcagcatctttagtacatgctaaaagattaaaaatgttttttgggaaatttgttttgtataaatatttatatagaaatatttatttaattctctatgtgagtgtttgtcttcctatgtacatttatatctagatgtgtcaatctttgtatcgatatgcattgctatgaatagtaagataaaaagtaacttctggctgggcactggggctcacacctgtaagcccagcactttgagaggctgagatgagtagatcgcctgaggtcaggagttcaagaccagcctggccaacatggtgaaaagccatctcttctaaaaaataaaaaaattagccaggcttggtggcaggtatctatatttccagctacttgggagtctgaggcaggagaattgcttgaacccaggaggcagaggttacagtgagccaagattgaacaactacactccaacataagcaatagagcaagattcaatctcaaaaagcaaacaaaaaaaaaccccaaaatgatgatatgtaaaacctttaaagttcttttatagaatataaaaaatatgtaaattcacatacatctgagagatacaccacataaaataattttaatatcaataacaaactggaaaatatagaggcatggtttatgtattcaactgaagttgttatgaaatttaaaaatattgttttaactttaagatgtatgtcatttccagctgtcaaaatgattacaaagataatatttatagaaagtatgcaaaagaaaacaaaaaataatcaaatcatgccagtacaaaattaaatgaaagttaagaaagtaaataaggaaaagagaaaaatataactactagaaacacacaaaacaatatcagtataactagtaataacaacatcatttccctaagcaatcattttaaatataaattaattaaactacttaataaaatgaaatgtaatcttaggattttggaaggccaaggtaggctgatcacttgatcccaggagttcaagaccagaattctcaataaagaatacaaaaaaggtagctgggtgtgatggcacatacttgtaacccagctacttgagaggctgaatgagaggatcatctatctgagtttgggaggttcaggcagcagtgaactgagcaaatcagcctggctgacagagtgagaccctatctccatgataaatgaggccaggtgcagtggtgcacacctgtaatcccagcactttgggaggccgagacaggcaaccacctgaggtcaggagttcaagagcagcctggccatcatggtgaaaccccatctctactaaaaatagaaaaaattagctggacatcgtggtgggaacctgtaatcctagctactcaggaggctgcagcaggacaattgcttgaaaccaagaggcagaggttgcagtgagctgagatagcaccattacattccagcctgggaaacaagagtgaaactcagtctgaaaatgtatatatatatatatgaataagtaaaattatataaagaaaaagaaatagaatgcctgagtagttttttataaagcatacagtatgctgcctacaaaagattcattttagcaatgagtcaaataggctgataaagtaacagaatgaaaaagatgtatatcccatgagaatagcaaccacaactgagtgaggtggtcataattataatagacataatatgctttaagtcaatactgtcatgaaacaatgattgatattgtattatgataaagtgagttaatatagcagaaatctgtaactataatatttatctatatatatatgtgtatacaacatcagggctttaaaacgtacaaagcaaatattaacaaaagtgaagcaagacacacatagcaacataattcctgtaggtgaatgtttagtaggaaaaactaaaaactgtaatggctgcatagggtcaattcatttcacttgtgcttgttgaattttttcttcaattaattgaagttcctctaatgcctctttagaaagggagcatttactgttaaggtcagaattagcttgtaaagtagaaaaaaggtgagacatagcataggtaggaatgcctaaagatggacaaatccaattaatgtctcctaataaatttgaaaatcatttagagtttttaaattatctctttcaatttgaactttttgaggattattagtactttgttctactttcattcctaaatattgaaagggagtagaggtttggattttgtcaggggctatgattaatcctgctgcagtcacagacttttctaactgttgttagcatagcattacttcctctctagtttcagctgcacataaaatgtcatccatgtaatggataatataactttttaaaattgttctctaactggcttaatagtttttccgacataagtttgacaaatagttgggctatttaacattccttgtggtaatactttccaatggtatctgtccgctggttctttgttatttatagtgggaacagtaaaagcaaatttttcataatcttgggtcactaaaggaatggtaaagaaagaatctgttaaatctatcactattagaggccagtatttaggaataatagttggagagggcagccctggttgcagtgcgctcatgggttgaaatatagcattaacagccctcaagtctgttaacattctccgtttacctgattttttcttagtaacaaacacaggagaattccaaagagagaaggtaggctctatgtgtccctttcgcaattgttcctgtgccaattctataaaagcctccagtttttcctgtttcagtggcattgatccacccaaacaagtttggcagttaaccaaacaaggggaatgggagctggaggctcagcaatggccactcctaaaaatgataccctaatccagttctatctatttgcccttttagttctaaaggttctggttggctattttcattttttcctaatcccttccccaggagatgtccaatttttctcataatttgtttactgttattactatactgttccataggaatagatatttcagcaccccattgttgtaataagtctctaccccatacatagattgagaggaatatgtgtaataataggttgaattgtcccttcttggccatctggcccttggcatggcaaaattaaagaactctgaaaaacttctgaggcagtccctatgccaacaatacccatggaagccttttctttgggcattgtcagggccattgatttaaagcagtaatagagacatcagctccagtatctactaatcctttaaagtctttaccttgaatggttactgtacaaataggtcttttgtcagaaacttgattaacctaatggacagcctttcctgctggattcgtactaccaaagcctcctgttcttttcactgtactacttcctagctttgtgtaaggtagtagtaataattgagcaattctttctcctggagaagcagaccatggagttgaggaagtaataactatttgaatttctctgctataatcagaatcaattattcccgtgtgaacagtgacaccccttaaatttaaactagaccttccaagcaatagaccaactcttcctgagggtaaagggcccctaactcccatggggaccttctttggtggctccccaggaagtaagaaaatgggaactgtactgcaaaaatctatggcagcagtgcctgctgtggtgggggacaattgttgtacatttgtaagggcagtggctgtgccagatatgcctcggtttgttgaggggcccaagttgggcaccccttcctgtttcccgaaagaggttgtccacattttttttattttttatttttttaaatgttattatttttatactttaagttttagggtacatgtgcacaacgtgcaggtttgttacatatgtatacatgtgctatgttggtgtgctgcacccattaactcatcatttagcattaggtatatctcctaatgctatccctccctcctccccccaccctgcccatctttactaaatttagaatgacactgatttgaccagtgaatcccttttttatatcgggggcagatactgggacttttttgttgcttaccggtagtagtctttgcctgctgatttccttttttacattccttttttgtgtatccaaattgcccacaattaaaagagactgagaaatggggcatgttttttcccctttagtccagccatagcttgagctaaatgaggagccttatgtaaattacccctaatgccatcacaagccttaatatattcagccaaatgagccttccctctcataggtctcatagcagcttgacattctgcattggcattatcatatgcaagaagctgtattgtaacatcttgagctgttttgtcagttatagctttatgcacagcctcttggagctgaggaataaaatcagcatatgattctttaggtccttgtaggacagaactgaaagaaggatatttttctcttgtaacatttattctctcccacgcccataagcacacagcatgcagctgagaaatggcaacattctctatcactgcctgattttctaatcacccccaattagggccaactcccattaactgttcaaaacaaacaggcacaggtggctgtgcttgtatgttttctcttgcctgagtttgagcttcatcagcccaccaagttttaaactgcaagtactgagatggagtgagaacagattttgttaaagtatcccagtcatatggtataaagtatcccagtcatacggtattaacctattgtcaagagccatattttttaataaagtttttacaaaaggagaatttggcccatattgactaatggcttgtttgaattcctttaacaacttaaaagaaaaagtggcccaattagctatatttcatccttcttgttgggttatagtaactggaaattgccatgcttcaaagtcaccttcagctctagctttttgaatcgaatttcgtataggaccaccaatcgctccaggttttaatgttgcaactacaggagtggtaagtttctcagctgtttcattttcttgcccattatggggagagggaggatatggccattcacttaattcagcaggtggaatcaatgggctagtaaaacatacctttttcagtttccctttgttttctttaatttcctccagttgctgttcctcacattcagaatctgaagttagttttttacactagtctgcctcttcctcttctgaatctgccttgtcatctgtttgaagtgccccaagagctgcctttatcaatgcctgcactgaccaaacagaaactggaattttggctccgtctttatatgcctttttaaattctctgccaattcttttccattcatccaactccatagtctcatgttctgggaaccatgggcaaaactgctctacagtactaaagagtgtcaataaattctgtgtactaactttcacatctcctctccataataaatgccttagaagtttaaacaagcagaatgtttgctttcattctgtcccattgttaccctggttcttctgagtgcccagcttagcactgagcttcttttagtcatcctcgggtgtcctctgacaatatgtcctctgcttccacaagctctagcgttccttcactggggtcttcatagtcccacattgggcaccagaaatgttggggtgatcaggcccaacaccaggccatgtgggctatgaagtctggcggagtcaaaggattgagacaagacaagttaagagtacttaaattgggtccagggggccaatgctagtatggaggctgtgaaggccccgagctctggaagcccacactatttatcagtgatcagacaaataagcaggtggtaaggacgtgcggatgtggggtaaacaggtgaggacgtgaggacttcgggctagaaaggtagcagtgcatcaagtgtagctgtgatggtttcacattttctttgatgcatacgtaatatgctgtgctacctgacataatggagaacatgtttatgagcctgggagagcaagaaacaaggaatcaacaagtctgtgccattccagaggccaggaggggttttatgccctgagccttggattccatccgagccacgaggggttttatgccctgggcttagattatggtgtggcaaggcagccttccaccctttggcacagagctttgtgttccagaggccacgagggggtttagaccctggacacaggacttgttccaagacccttttacattaggacaaacaagctagtcctgcctcagctcttctaccaacagtgatccacccacctcagctgctcaaagtgctgggatcacaggcatgaaccaccatgcccagtccatttttagtcctttaaagtaaacacagatttgtttagataaaagctcattttaagagcacacaaaagcttagcacaaagataggattaaatttagctatacagaatgataaagactaaaagatactaagattctttgaaagaaacctgattatccaaggtaattatccaatatttgcagactgaagtacttatattgcaaaagcaagaacagttcagtgcataaactgaacagtggagtctgtagttgtaccttgctttctatttattacttcagagcaattagcatagttatgtgtagtgtttgtagacaacctgcattcatatacactaaatagtattttttttttttttgagactgtgtctcactctgctgcccaggctggagtgcactggtatgatcttggctgactgcaaccactgggtcccgggttcaagcaattctcctgcctcagcctcctgaattgctgggattacaggcacccaccaccatgcctggctaaatttttctatttttagttgagatggggtatcaccatattggccagcttgattgtgaactcttgacctcaggtgatccacacacctcagtgactcaaagtgctgggattacaggcatgagccataaagtttctttttttttgagatgaagtcttgcttttgtcccccaggctggagtgcaatggcatgatctcagctcactgcaacctctgcccctcaggttcaagcgattctcctgcctcagcctcccaagtagctgcgattacaggtgactgccaccacacctggctaataataaacagtattttcttttatttattattattattttattttttgagacagagtttcactcttgttgctgaggctggagtgcaatggcatgatcttggctcaccctcagccacacaggttcaagcaattctcctgcctcagcctccctagtagctgggactataggcatgagccaccacacccagctgattttgtatttttagtagagacggggtttctccatgttgatcaagctggtcttgaactcccgacctctggtgatgtgcccgcctcagccacccaaagtgctgggattacagacgtgagctgccacgcccagccaaataaacagtattttctacaatagtatgaataaaaatccacaatacttactttgaatgaatcacttgaatgtttattttaatattgttatttacacttttgaaatataaattgttttaactgaagtatagttgcaatttttaagaatgctacatacattactactagtttactaaaattattcatactcagatatttatatctaatatccaaaaaaaattgctaccaaattgctacagtagatattagtctgacatgtttattactttattcaatagggataattataagtaaacataatttaacatcttttatttcactaaattggaatgctgctattacaaaagaaataaagacaggtaatctggccacccaaaaaccataatagttctcctgttaactatgttgtaagttctaatgtattccaccataagaacatggtcagattctatttcttcatcagaaagtgttgttggaagttttcaggtatatttcaatgtagaacccccattcagtggctagaaaatgagacagcagcagagatggaaaaaaaaaaactataaaattcttgtgaaaatctgccccctttcttcgtaatgctcatgtttctcatgctgagagtagctgtgcactttgggtggttagagagaaattgcttttaggggactattttctggctgacttgatcaatcttatatctaatctgagctttttcataagatctttttaacttctctcaaaataatcttgctcagatagagatctggttttctctccagtgctttgggtgtctgtttcagaagtgctgttagtttcccatggtgtctgaatgagctgggctgtcacagtgagaatttctggagctatctctatctggactcatgctggaaattcagcagtattttttttatgtcaccattataaataaaaattggggctgaaactccactcacattcccattgttgtgaaggtgcaattctacccacgaggcctgcaggctctcctcctgcagctcaggctttactatctaatgtgactctagagtgctgctgtagcaaatggggttcacataaactgtgagctgtgctctcggctgtgcctcagtggcagatggtagaggccaagagaggacactagcaaccaggagaaagcaagcaggagtgctataacccagtgtcagggagtgcagagccactgctccaaaatgtaaatagccaaaatgatagaaccctattcaaccacttttgtagctagtgaaaacctaccttcagcaggcacctggcttcaagctgctaaactaccttctgttatgaagatggaaaaagtttgtccttgaatataagcaattagcatacacagatggcctcttcaacctgcctgtgaatttaggatgaactgtgtatgacgtggtgctgtaaattttacttgtggactaattatggtgatcatctttctttgcagtctcttaagcagattgactatgatgcatgtcacattcaagtttaatggtgtaataaaactgttttctttctgttttactattgtggagtttttttggggctggagaaaattgttcttttaattattgtttccaaacactgcctagaattaccaggcatgatataaacacataaggtgccaaccagaatttactttagaggaaactttccctctcagacttccagtcaactcacacttgtgcaacaaagtgcatgctgtcccctaaatatgcaggcagaactgtgtctctgcccatttggtatctatagtcctctatagttacttctagagagactagaccacatttctactaacttcacagggcaacaattaatcattttatctcaatgactcttgtatcttcagacctgaaactgattcagagaccatggggcccacaatcctaatctgagtaacatgtgtgcattgagtacatatgcagacatgagaatctccactttcctcttttttctcttggtaaattgctcacaaatgtataggtaacacctgctcctactccagccattcaggctctaaatctgcagctccacattttgtatccaggtcttgagatttgggggatagaacatttttgtctaaaaattgcaagtccttttggttatcaaactcagacgttgaaatgaaagtgcagttgtctttcttcccctttaaaatatgtattcatctcttgaaactgtttgctattgccacaagtagatatatattaaactaataatgccacattggatgctatatctcataccctaaaccataataatatatatctaatcaataatcaatgctatttctgtaaataaataaatatttctgacaaacaactttgccattaaaaaaatacatgaaagcagtcatggttcctacaattcagaaacatttagtctagactagcaactgcataaataattgaattatgcatcatatggttggtacaatatatagacgcatccaaaatcttgggctttatttaggccactttctttatgctgttgtgacttctgatgtctaccactgaagagatatttattaacagaagaattgttattataatttctttctttctttctttttttttttttttagacagagtctctgttgcccaggctggagtacagaggcactatctcagctcactgcaatttgtgccactagagttcaagtgattctcctgcctcagtctcccaagtagctgggattactaggccctgccactgtgcccagctaatttttgtatttttaatagaggctgggtttcaccatttttgtcaggctgttcttgaactcctgaccttgtgatccacctgcctcagccttttaaaatgctggaattatgggcctgagcgactgcacactgctgtatagtttctattttttttttaacattgctaactgtacatatttattttccaataaaattaccctaggaaaccttaagggatttgtttaaattgcatattaatgcatagtatacatttaacaggacagtggctagaaaagataaaaattacagaaactctgggatttaagtttcttttaggtaagcttagaaaaagcaaaactggaagtaccccagtggcatagagaacagaattctacatagggtcctcaccctgccccagacctgttcagattcaccctttttggaggccttattttggtctggccctaccatggagtcttgccttgcagaattgattagaaaagatcagagttttagctggtgaatcctgctgcctttctagacctgctgctcacaatttcctgaaatcctaaagcagataaatgggaaaaataaagtatgtatttgagggtcttagtttttaaattttcaatgaaaaccagtggttgcagagacattctatttagcaactttttttttattcctgcagatccagtagtttctgcacaagtcacaaaaaagtaaatacaaacagaataaaattttctctaaataactgaagaaatgaaaatgctgggccctttttctaaatagtggaaattattaaatccttagtaccagctcctaggatgttatgagaattaaatcacataatgtgttatgcccaacacagtgctctgtatcatacccttgagcatatagtacctgcttaataacattgcattagtacatgtgtacatgttgttttttaaatccagacctattcagacattgctgccttctgtttcttctgtaaactttacagagtcggcaaagaatatataactttaggatacagatggattgtccttgtttgtatcagaagtatttggttgtgacaagagtgctgagtgtaagggaccctgtgctgtgtctgcttctgtaactaatggtaataatgagccaatggggagcaacatcagcattgacaggggacttgtttaaaacccccattcatggacccttttcaaatctgcaatcacattacataaagtgggtaaaattaccaagtgatttataagctcgttaaagcttgagaggcaatgcttagcttagtgattatcagctcaggcttcttattagggtcacatggccaatttgcagaatctattgtgccctccccgcagcttctgtttattgttgtgtgtggaagcatccacgttgttttaatgaagtgcctcatgtgactctaaggtaaggacagaatcaggtttgaaggcttcaaaatacattcatgagagttaagttccacctttgcactaaagcatggtcactgggcctactctattttgacttggtagggacaggtcagtgtggtggatatttgtattactgtagcagaaattgctggtgtctgtggcaggggagggcacctgagtacaggaaagaagaaacttatatctttatcttcatggaggagtgtattgttcccaaatctcttctgctttaatggacagaaatgggtgggctttttctgtcttttctgtcagttgatgtcatgctagcaggtaaacatgtagtagtgccacctttaagggcatgttctccagatgcaggtgtaatttgtccagagaatctcagaagaaatccggaggagaaaaaaaaaaaaggtttttcttcagttaaacatgtcccaaatgaaaagctgtgtccactctgcctccttgaatgccatgcgtttagtacttgcaaatctttacttctctacttgtgttttttcttcctaaggggtttgatttaactacttctctaaattcttacaatagtcaaggatctctgaaaaatatttcttttctttatcccagagccttctctttattctctacatcatagcttcttatatgccacacagaattctcagcaagaatttatgatccacaatattaaaaatgtttcctttgtggctgttgaacatggaaagatgtggatactcaagatttctattgaggaaaactgtggtccttagtacagatagagaacatgtaatgttgaggcttcaatcatgtgttccatttgctctaagcagaacaggattaagagaatgcgtatttaaatgggatggcatttattacccagaaagttctgaaaaaaattattaggagattcctgctctctagggtgcttaatgaagcctacttaaaattcctactaaaaattacagaacataggagttacctgtgttttgaagtttgcataaaactgattttctttatggttaaattcagattttaatttactttgtttgggaggaatatttcaacactgatgctgtgttcttgtgtattagtatatcataaaaatttttttcatgtggttaatgggtaatgattcatttggtgaaatagctctctgacagatgttttcactatataattattttttcttcattattaagtatctttctgcagctgatatgcataaaccatcacatttaatctggaagctgttcttttttcttatttatttatttattttattttttattttttttttgaggagtctcactctgttgcccaggctggagtgcagtggtgtggtctcggctcactgcaacctccgcctccggggttcacaccattctcctgcctcagcctcccttagtagctggaactacaggcgcccaccaccacgcctggctaattttttgtatttttagtagaaacggggtttcaccatgttagccaggatggtctcgatctcatgacctcatgatccatccgcctcagcctcccaaagtgctgggattacaggcatgagccacctcacccggcccttttcttatattttactacatttttttctggaaaattaaggctcttatctttgtttacaggccagaaaaagtgggaaaaacaaaggctcttccatttattgaatgacaaaatatccttcttaggccaaaaacattggcattactagtgagcttgttagaaattcaaaaaatcagtcaggtacagtggctcatgcctataatctcatctctttcggaggccaaggtgggctgatcacctgaggtcttgagttccagaccagcctgaccaacatggagaaaaacctcatctctacaaaaaaaaaaattagtcaggtgtggtggtgtatgcctgtaatcccagctatttgggagactgacccaagagaatcgcttgaacctgggatacggaggttgctgtgagctgagattgggccactgcactccagcttgggcaacaagagcgaaaatctgtttcaataaataaataaataaaaattgagagatgtcttccaactcaacatgtcttttccatttggaaaatattcacaactacttccgtatgatgtaaatatagcacacaaaagtgtacatgttcatgtttatgcttttaattttatactttattatctagaaaagtatatgaacggatgttgtggatcttacgctactcttttttcttagagttagagaatacattagagaatatttctgtgttgaaaattattttattggataattttagtcagtcctataagtcagaaccagttctgtttactctctaatttcaccttaagtcaaattaaaaatgtcgctcatggttacttagtaaatatgtgtgtgtgtgtgtgtgtgtgtgtgtgtgtgtgtgtgtgtgtttcaggtaccatagcaatttagagacgtggccatagaattctctctggaggagtggcattgcctggacactgcatggcagaatttatatacacacgtgatgttagagaactacagaaacctggtcttctttggtgaggataactttaatacataattcataatatacgctaaagattttatttcttttttttttttttttttttttttgagacggagtctcgctctgtcgcccaggccggactgcggactgcagtggcgcaatctcggctcactgcaagctccgcttcccgggttcacaccattctcctgcctcagcctcccgagtagctgggactacaggcgcccgccaccgcgcccggctaattttttgtatttttttttagtagagacggggtttcaccttgttagccaggatggtctcgatctcctgacctcatgatccacccgcctcggcctcccaaagtgctgggattacaggcgtgagccaccgtgcccggccttatttctttattttatggaatgttttttagtaatttattcttggcataaaagagtttcagatcccctttttccagaaaactttcaaaatttgttcatttagaaaagaatttcttcaaaatgtttcatcttaatccaaactttccacattcctgagttgagctgtatttttcactctaaattagtggtaattccagcaatttagtagcataaaatatgttgcccctacctgaaaatctaatgtttgattcagtagtaccaggtagtcaggtagtaaaattaaaaaacctacaaattgaaagtattttctaaatatttagaaatttcctttagaaattaatattttggtattaatttactagaatattttattatatcctctctgctgagcacattactaacctgtacttggagaatatgagcatgattcatgttattttttttttttttaataaaacaggtactgttgccgggcgcagtggctcacgcctgtaatcccagcactttgggaggccaaggccggcggatcacgagggcaggagatcgagaccatcctggctaatacagtgaaaccccatctccatcctgaccgagaccatgctggctaacacggtgaaaccccgtctttactaaaaatacaaaaaaaattagccgagcggggtggcgggcgcctgtagtcccagctactcgggaggctgaggcaggagaatggagtgaacccgggaggcggagctggcagtgagctgagatcacaccactgcactccagcctgggccaaagagcgagactccgtctacaaaacaaaacaaaacaaaacaaaacaaaacaaaacaaaacaaaacaaaaaaacaggtatcgttgtctggaagtcagacctgatcacctgtctggagcaagaaaaagaaaaaaacctttgactatgaagagacatgagatgactgccaaacccccagctaggtgcgagtgaaaatcaatacaatagacaacacagataagaggtcccaaggtcaaagagaaagccggtccttaaaatgtgatttgggaagctgtgttccaaagaaaatagttcctgggcagctcgtgttttttttttgttattgttgttgtttattttttaattttgctttcacagagaggcatcttctgttttatgattttaaattctctaagaattctgcttttcttttggtgagcttccttcaagtccacagtgagagccaaagtcctcatcatggcatataagagactgcacaatctggctgctttttcattgttttgggggcacataaatatctgcatgctttttagagactaaaactattttttaagttttttttttcatcaagtctgaaatgtgtgagagtagtagtttctgttgcatttttttgttcatttttccttacagtccattctgttttcattactatatcatcttgaaatatagtttgaaattagtatgatatccttctgctttgttcttttttttcaagatggctttggctattcaaagtttattttaattttatgtaaattttggaattgtattttccattactgtaaaaaaataccattgcaattttgataggaagtttattgaatctatagatcacattagataatatggtgcttcagtaatatttattctttcaatccatagacataaaatagtttaaaatttatttggatcttctccaatttttttcatttttttattgtgaagattttttacccagttggttaattttttctcagaaatttattatttaatgccttagtaattgagtttttgtcttcctctactttattatttttttgagatggagtcttgtactgttggttgcccaggctggagtgcaatggctcagtctcggctccctgaaatgtccgccacccagattcaagctattctcctgcctcagcatcccaactagctgggattacaggcagccaccaccacacccagctaatttttgaatttttagtggaaacgggattgtatcatgttggcacactggtctcgaactcctgacctcaaatgatttaaccgcctctgcctcccaaaatgctgggattagaggtgtcagccactgtgcccagcctcattctctattttatcagatagtttgttttaagtgtatgaaaccatacgtattcttaaatgctaattttatattttgctaatttactgagtgtatttaatagtttagacaggttttaatgtactgtttatggtttttaaacataagattgtatgatctacaaacagcagcattttgtttttcttcaggttcaaaagatttttttattttcttgtctaattctttggccaatacttccagtgctacattaaaatagaagcattgacaatgggcaaaatatagttttgtattggtgtctgaatttgatggagcaaacacatcttcatgttttttgtttttgttttgttttttgtttttttttgagatggagttttgctctcattgcccaggctgaagtgcaatggcatgatctcggctcaccgcaaactccgcctcccaggttcaagcaattctcttgcctcagcctcccgagtagctgggattacaggcatgcaccaccacacctggctaattttgtactttttagtagagacagggtttctccacgttgaggctggtctcaaactcctgatctcaggtgatctgcctgccttggcctcccaaagtgctgggattacaggtgtgagccaccatgcctggccatcttcatgtttttataaactgattttagaaggtaaagatcttttgttgggtccttaggatgataagatgccctctgaatttgtagtgaagaggggctgtagcttggtcacaaggctgctgggtctgcattagggcccacctttagttggcttgttacaggggcttgggttgttgtaattcccattttatttttgaacaaactgcatatccttcaggactttgctctacagggcagacactagggcacatttttgcagttggtttttcacatggtgggccttgtatcaggatgtggatgagtgtggctttcactaagtaccagagagcatttcctcaggtaactgtgtgagtttctatataggcagcactggccatgaactgtggctcaggtaactgaaactgcgtcactgaaccacttcagggaccacagtaaaggccaacttctgcagttatatttttctcatttcctgttttactttcttaattttcatttaattttgtactggtatgctttgattattttttattttcttttgcataaattttataaatattatatttataatcatcttgaaaactggagattacatctgaaagttaaaacaatatgttttaatcttataacaacttcaattgaatacaaagattatgcctctatattttagtttgttattcatattgaaattattttatatggtgtatctattaacagatttatgcagatttacatattgctttttatattctattaaaaaactttaaaggctttatgtgccatcattttttaaaaattattattgagattgaatcttgctgtcttgcttaggacggagtgcagtggtggaaccttggctcactgcaacctctgcctcctgggttcaagcaattctcctgcctcaggcctcccaagtagctgggattgcagacgcctgcacctagccttggtaattttttgtatttcttagtagtgctgggctttcaccatgttggccaggctggtcttgcactcctgacatcaggtgattcacctgcctcagcttctcatagtgctgggcttacagttgtgagccaccgcccccagccagaagatactttttatctcactattcctagctttgtatatcaatacaaagattgacacagctagatataaatatacataggaagacaaatgttcatatagagaattatataactatttctatataatgtttttgtatacaaaatatgttccccaaaagacatctttaatcttttagcatacatctcagatgctgatgtagaattatttgttttcttttgctaaataacatgtcagaatggaacgtagccatacaactttttatgtaaataccaacaaagctttatcttcaagggcaagtctacagaaataagctgaaaataaagccatgtaacccatctgtccaggttagtatttcagtgccctgcatttctcctcagtgtctgcatgttctgttcacatctaccatttggggcctgccttgataaagccacagtgactatttatataattgaatgattggatccatgcgtgctgagcaaattggctggtgggagtcacctgggctgttcaaattggctgattggaatctcctgggttctgctaatttgcttatttaatttacctcggcttcaggggtagaatatggagatatcacctgacctactttatttctgatgcttttatttttgtggggcctatgcataaataaacattacgtagacatacacatgtaactcattttgtgcatatatgtttatctagccatctattttatatgtatatgtacagaaagaagactataagataaacttggtcagaggctatttccatttctttacctataggttaggtaaattctatcagctacttagctcagtgaagatttattcaaaccaagccacacatcacatcacatttttttttccataaatgtaaaaatgtttttaataacctggcacctgggtgtttttaattctggtcacactaaaccagcccagtgaggttttgttcatctgtctaggaactgccagaaatgctcaacaccagtgggctgagccttcctcacaaggaagatttgacctggcaaataagagccacctgtggcacttcagtgaatgttctctatcacccctttgaaatgtggccaagtaccacgtaccattatatttgcttccatcatcaccatctgtcttccgaaaagaggcctaaacttcattttcattaccataaatatccaacttctgccataaagacgaaaagactagagggtgactttacatcacacactcttggaaaaaattagagttcttgtcttgatggaagttctaaagagtgggtgagacattaagtgactaccaggagctagataattgctgttttactaacagatgttcattttcatttccatattgtctcaagttatggtaataataaagtaataatggtatccaggaaatttcaaaaaaacttatttttttcatcagccataatagtaatcaaagacagagaaataaaggtttttaagtcataatttatattttaaaattaacatgcttctagaaataaaaaaggaaaggaagaaagaaatatacaaacaaatgaaaggcagcctggtcaacatggtgaaagcctgcctctactaaaaatacaaaaattagccgtgtttggtggtgcacacctgtaatctcagctactcaggaggctgaggcactagaatcgcttttacctgggaggccgaggttgcagtgagcagagatcgtggcaatgcactccagattgggtgacaaaatgatactctgtctcaagcaaaataaaaacaaaaacaaaacaaaaagaagggaagtggaatactcacaatacctaaagtatggaatcaacttaggtgtacatcaataggtgaatggagaaagaaaatgtggaattatgtacacaatgcaatgctattcagcccttaagaaagtcttgttatttgcagcatcatttatgaacctgaatgatattatgctaagtaaaataagccagcacagaaaaacacacaagcaaaaaaattattttatttttgagatagagtttcactcttctcacccaggcaggcgatggtgcagtggcaccatctcagctcactgcaatctctgcctcctgggttcaagcaattttcctgcctcagcctccctagtacctgggattacaggtgccagccaccatgcccagctgatttttgtatttttagtagagacaaggtttgtctatgttggccatgttgaccaggcttgtcttgaactcctgacctcaagcggttcacccacctcagcctcccaaagtgctgggaggtgagaggtgattacttcttgcatgaatgagattccctttttttccctctgccataggatcctcttattgtccctactggaagcaacatgcagaaggcaggaatgatgacaatatacaaatacgtttcctgccatgtgaccaccataagcagcttgcaacatggctcacctagaagttacttactttcaggccagcaagcgtgtttttctatgatgtgtctctttctcttgaaagcacctctgattaagtttagcacaatcagtgtaatctccatttggataaacacaaagtcaacgcaagaggaacctaatttcatgagtgatttcacaccacagttacacatttttttacgttggagaggaaagcaggtgtgcaacggactgggaatccagggtattatcttagaatgttgcctacccatctcaataaacttttacaatagtctttctgctgcttttgttatctgcataaacaaagatatcatgtgcaaataataattaactactttccagctttattcactacaaatattaacatcttttttctggcttaaattatttttcctttatgtaccattttatacattcacccacacatggaacaataaaaatgtatccacttatttaattttggttaaattttcattaaaatgagtgttaaaaataactttttttctgtttgaagagggcttttattgttttactcaagagtgttattttgcccagtgcggtggctcacacctgtaatcccagcactttgggaggccgaggcaggtggatcatgaggtctggagatcgagaccatcctggctaacaccccatctctaacatcgatgactaacattgagatcatcctggctaaaccccatctctactaaaaatacaaaaaattagccgggcgtggtggtgggtgcctgtagtcccagctactcgggaggctgaggtaggagaatggtgtgaacccaggaagtggagcttgcagtgagctgagattgggcggctgcactccagcctgggcgacagagtgagactccgtctcaaaaaaaaaaaaaaaaggtgttatttctggagacaaagttgcctgtgctttaataggtagattatggaaataatttgaaacataaaccataaaattttacattaataaattcagtgcaaagcagaaagtataaatttgctttcagcattttcaaggtgtttagttttctattactcacctaattaaatttgttttgttccaataattgttcttttcttctgaaaatatgtacaaatgcatactgacacaaacacacttactcacttcataattttcttacacctaaggttcatcttcagagtaatatgtgtatatttcactctatgaaaattaaaactaaaactatgttttcaggcagagagaccacatgttcaaagactatatacacattcaactatataacaaatatttattaataatttttcaggactcagaaataaaaggattttatttctatttctttctttttttttgagacagagtctcgtgggagtacagtggtgctatctcaactcagtgcaacctcggcctcctgcgttcaagccattctcctgcctcagcctctggagtagctgggattacaggcacgccaacatgcccagctaatttttgtatttttagtatagatggggtttcaccatcttgctcaggctgctctccaactcctgacctcatgatctgtctggctcagcctcccaaagtgctgggatcacaggtgtcagccactgtgccaaacccatattctatttatatctctgtataatttgtattatgaccataaaaataaccctgcagtcaaaaagaatttaattgtgcattttaaaataactaaaagtgtataattacagtttgtaatacaaaggataaatgctagaggtgatggataccttatttaccctaatgtaattactacacattgtatgcattaatgaaaatatgccatataaggcgtaaatatatacacatactatatacccacaaatactaacaataaatttcaataggaacaaagaataaaaatttaacctatgggaaaaatattcttcaactcatttgcagtttaaagccactgacaaagtgattactagagatgttattccactatgtaccaaatagtatactgctgccatcttttacctacacccttgagtaagttgggataggttaaagttagtcacatttaaaggcttatatttaaagtcaacttaaaggcttatactttctggaagattttttcacagtaattgcacttttaatgcctttattaactatgaaccttcttatattgagtaagatgtgagtgggcattattcctgtaattccaacacactgggagatcaaggtgggaaaaatcacatgaggtcaggagtttgagaccagcctggccaacatggtgaaaccctgtatctaccaaaaatacaaaactagctgggcgtggtggtatgtgcctataatcccagctacttgggaggctgacacacaagaattgcttgaacctgggagtggatggttgcagtgagtggagattataccactgcactgcagcctgggcaacagagcaagagtgtctcaaaaataaaataaaattggccaggcatggtggctcatgtctgtaatcccagcaatttagggggctgaggtgggttgatcatttgaggtcaggagttcaagatcagcctggccaacatggtgaaaccccgtctctactaaaaatacaaaaaattagccaggcatggtggcaggcgcctgtaaccccagctactcaggagactgaggcaaaagaatcagttaaacccaggaggtggacattgcagtgagctgagattaagccactgcactctagcctgggcgacagaaaaaaactccgtctcagattaaataaataaataaataaataaataaataaataaataaataaaattgaataatattcagtaagtgaactagaaacacagacaactaccaaagatcagaaaaatgaaaataacaagaaatattaaaatagcaaaaaaacagaaattgtggatataaaaaatacaaaaaatccctgaaaaatttctttaaaaaatgatgtaaacatggaaaagttgaacaaacaaactaggatacacataaagatatttataacaagcatacatataagcaaaatttcaaaattcacagataagagaattttgggagctcaatgtaggcagatgtatgatgaagaattgttgtatgcaactgaagttaattttttaccacattcagatatgttgttggatcctttagaggttttgtgcagtcctccaaggtaccactaagaaaatatctgtatagatacacaaaagaaaatttaaaaaacctgaaagcatgtcaatacaaaaatcaaaaaaacacaaaaaagacagaaagagaaaatgagagacaaagatacaaaatctaataaaacaattaataaaataccattagtaagtttttctcttttagaaaactatttaaatatatataattatatttccaatcaagagacatactttcaataaaaaggtttattaaaaattctgtgaaatcaagattcaacttgactttctacaagagtcagttgagatctaatgacaaaaaaagactgaaagtggtgagatggaagtagaaatttaatgtaaatattaaccaaattagagcagaagagctcaaaataatattacacaagctacatcttaagtaaaaaactgtcatattttataaaatgtactttaagtcaaaacttcaaacagacaaaaaaggacatttaacaatacatagattcattccctgtgaatgtatgacaaatttgtttatacatgcatgtatttgtgtgtgtgtctcaaattaggctttcagatatataaagtaaatactaacaaaactgaataaacacagagagagcaatataattatagtaggatatttcaataccccactttctgtaataataataaaacaagatgatattagtaagggaacagaggactaaaaggcagtcaaaaacaataatttctaatgaaggtatagagaacactcctcaacaacatcgggatacacagccttctcaatagctcattcaacattcttctttataaaccacctgataggccaaaaacaaagacttaacacattttttaaaaccgaaatttcatagattaccttctacgacaaaaaatggaattagagtataaaacaataatataaataattgataaatttacagctatatagaaatgatacaacacactcttgagcatgcacttgttgaaataactgggctgggtgcggtggctcatgcctgttatcccagcattttggaaggccgagacaggtgaatttaattccatctaaaaaacaaacaattcaaaaaagaaataattaatattgtgaagatttctgtaccgctcaatttaatctacagatttaatgcaatatttttcaaatttctcattgcatttttgaagaaataaaaacagcaaatccaaaagtatatggaatctaaaaaggcaataaagtacccgacaatcatcaaaaaaaggaacaatgttggaggcattaccatttctgatttcaaaacacatcaaaaagatacagaattaaaacaatttggtatgagcataaaggtgaaaaagcagactaataaaatagaatgcagcacacatattaactttcacataattattgcagcattgttactgaaagccaataggtaaaagcaatgcaaatttctgtcaccaaatgattctgtagatataaaaatagtggaatctcgttcagttttcaaaaagcagaaaatattccaacaactattaagataaatattgatgacattgtgcaaaataaaatgagccagccacaaacagagattttataagcatttatacccttagaaagagaaaacagagtagtgtttgaaaagtgccacaaaatgggaagaattggtagttgtttaaggtgtatagagctttagctttgcaagataaaaacattctaatgatatgttacataataatgtcaatataattaatatgaacaaactgaatatttagaaatatatacttctcactctgtctcccaggctaaactgcagtggcacaatatcagttctctgcaacctccacctcccaggtttaacaaattcccctgcttcagcctcctcagatgctgggatgacaggaggatgccaccattcctggctaatttttttatgacactgcgccctgcctagaaatattttaatgtaaattttgttatgtgtttctgacacataacacataagtaaaaatcaacaataccagcctggccaacatggtgaaaccttgtctactaaaaatacaaaattagccaggcgtggtggcgcaggcctgtaatcccagctattcgggaggctgaggcaggagaatggcttgaacgcaggaggcggaagttgcagtgagctgagatcccgccgttgtgctccagcctggtcaagaagagcaaaactccctctcaaaaaaaaaaaaaacaaaaaacacctgttacaacaaacctacacaacaaatatacaagtgacacaaaactacgggaataatatttatactgaacaaactgcatatttagaaatatatactttttgctctatctcccaggcgaaactgcagtggtacgatctcggatcactgcaacttccacctcccgggtttatgcaattcccttgcctcagcctcctcagtagctgggattacaggcgcgcgccactatgcctggctagttttttgtattttagtacagacagggtttcaccgtgttggccagtatggtctccatcttctgaccttgtgatccacccgcctcggcctctgaaagtgatgggattacaggcgtaagacattgtgtccggcctggaaatattttattgtaaattttgttaggtgtttttgacacataacacataaataaaagtaaacaaaatgcctaaaagagatacggagttattattgtttttaaattatctttaaatccaaaagtgtttcttggacacaaaaataatatagattcacaaataaagagatgttgaaatcaggagaatttttatgactactcacctagacaggattaaaaaactgttacaggtcgggcatggtggctcacgcctgtaatcctagcagtttgggaggccaaggcaggcggatcacctgaggtcaggagttcaacaccagcctgacaaacatggtgaaaccctgtttctactaaaaatacaaaattagctgggtttgggggtgcatgcctgtaaccccagctactcaggagggtgaggcgagagagcgacttgagcccagaaggtgaaggctgcagtgagctgaggtcctaccattgtactccagcctgggcaacaagagcaaaactccctctcaaaaaaaaaaaaaaaaccctgttacaacaaacctacacaacaaatatacaagtgacaccgaactacagggataatatttatacaggcaaagaaacagaaataattgtattggcaatagacatggtttattcatatttaattttgctccacactgtcttaaattgtacagagttaaatattgtcatatacaattataatataaactaaaaaatcaaaacacaattaactggtgtgatgtgatgtacccaagaatacacaacacaaaaatattaaattgcaaaaaaaaattaaaacatggaatgtaaaacttattgaataccataaagtagatcaatgttttcatgaaaggaatcttagcatatagggaaaaagtaatacataggttacttgaagattaaaaaaaaaagaaaaaaaagctgagaacttcccaaattttgatgtaacaaaaaaattttctaacctgtaatactagattcaaaattatcttaatttaaaaagaagataaaaatgaagactttgctaaataaaagttgagtgttcatcaccattagcacagtcctagaagatatactacacgggcttgtgtgctctggctcacgcctgtaatcccaccactttgggaggccaaggagggtggattgcctgaggtcaggagttcaagaccagctgaacaacatggtgaaactccatctgaactaaaaatgcaaaacttagcccagcatggtggcacacacctgtattcccagctactcaggaggctgaggcaggagaattcttgaacccaggatgcagaggttgcagtaaaccaaaatcatgacatgcccctttagcctgggcgatagagaaagactccatctcaaaaaaaaaaaaaaaaaaaaaaaaataggccaggtgcaatggtgcccactgcactccaccactgcactccaacttgggcaatagagtgagactcagcctaaaaaaaaaaaaaaaaaaaaatcaaaatgattgtacataaaacctttaaagttattttatagaatataaaaaacaatatgtaaatctgcataaatcggccaggcacagtggttcatgcctataatcccagcactttgggaggccaaggtgggcggatcacaaggtcaggagttcgagaacagtctggccaacatgcagaaaccccatctttactaaaaatacaaaacttagccaggcacggtggtgcatgcctgtaatcccagctactcaggaggctgaggcaggagaatcacttaaacctgggagttggaggttgcagtaagccgagattgcatcactggactccagccttgacaatagagtgaaactccgtctcaaaaatttaaaaaactgcataaatctgttaatagatacaccatgtaaaataattttaggccaggcgcagtggctcatgcctgtaatcccagcactttgagctgccaaggtgggtggatcacctgaggtgaggagttcgagaccagcctgtccaacatggtgaaactcctctctctactaaaaaaacaaaaattaggcaggtgtggtggcaggtgcctttaatcccagctacttgggaggctgaggcaggagaatcgcttgaactcaggaggtgaaggtttcagtgagccaagattgtgccattgcacttcagcctgggggacaagagcgagaagacttcgtctcaaaaaatcaataaattaaataataattttaatatcaataacaaactggaaaatatagaggcatcatttttgtatttaactgaagttgttatgagattaaaacatatgttttaactttaagatgtatgtaatctccagatttcaagatgatgacaaagataatatttatagaaagtattcaaaataaaatacaaaataatcaaaacaagccagtatgaaattaaatgaaaatttaaaaagaaggctgggtgcagtggctcatgcctgtaattctagcaatttcggaggccgaggtggcagattacctgaggtcaggtgttcgagaccagcctggccaacatggtgaaacactgtctctactaacaatacaaaaattagccaggagtggtggcaggcatctgtaatctcagctacttgggaggctgaggcaggagaatcatttgaacctggcatgtagaagttgcagtgagtggagattgtgccattgcactccagcctggggggcaagcatgagactttgtctcaaaaaaaaaaaaggaaaacaggaaatgacaaaaatataactactacaaacacacaaaacaataacaatataactggtaattacaacttcatttttttttttttgaactggagttttgcccttgttacccaggctggagtgcaatggcatgatcttggctcacagcaacctctgcctcccgggttcaagagattcttctgccttagcctcccaaggagctgggattacaggcatgaaccaccacgaccatctaatttggtatttttagtagagactgtgtttctccatgttggtagggctggttttggactcctgacctcatgtgatctgcccatcttggcctcccaaagtgctgggattacacgcctgagccacctctcctggcccctacaacttcatttctttaagcaatcattttaaacataaattaattaaactacttaataaagtaaaatgcaatcttaggactttggaaggcaaaagtaggctggtcacttgatcccaggagtttaagaccatcgtgggcaacgtgacaaaactctatctcttcaaaaaatacaaaaaagctagctgggtgtgacgcacatacttgtaagccagctacttgagaggctgaaatgagtggatcatctgagtttggtaggttcaggcagcagtgactcatgcaaatcagcctggttgagagagttaaaccctatctcaaaaataaaggaggccaggtgcagtggctcatgcctgtaatcccagcattttgagaggctgaggtaggaatatcacacgaagtcagtagttgaagaccagcctggccatgagggtgaaaccctgtttctaccaaaaatacaaaaaattggccaggcatgctggcaggcacctgtaatcccagctacttgggaggctgaggcaggagaatcacttgaacccaggagccacaggttacagtgaactgagattgcaccattgtactccagcctggtcaacaagagtgaaactccatctcaaaataaataaacatatatataaataaataaaattatgtaaaggaaaagacatagaatgccttagtggttttttaaaaagctttctgtatggtgcctacaagagagtcattttagcattcattcaaataggatgaaagtaacggaagaaaaaaagtatattcaatgaaaatagtaaccccaattgagtgaggcggtcataattatattagatataatacgcattaagccaagtactaccatgagacaaaggttgatattatattattgtaaagtgagttgatttaccaggaatctgtaactataatatttatctatctatatgtatgtgtctatataacatcagggctccaaaatatataaagtaaatattgacaaaactgaagcaagacatacatagcaacacaataattgtagacatcaataccccattttcaataccagaaaatacagataaagaaacagaaaatgtagacaacattacagactatattaattattttgcatatagaggaataattgagaatacataatttaaaaaggaaaaaggcttatttggctcacactttggcagactgtataagaagtgtgtgccagcatctgcttctggtgaggttctcaaaaaacttacaatcatggtagaaggtaaagagtaactggacttattatatggtatgagacaaagcaattgtaaggtgaaggagccagcttcctttaatgaaccagctctcatttgaattaatagagtgcaaactttttggttaccaagaggatgtaccaagccattcatgagaaatttgccctcgtgacacaaacatgtcccaccaggtcccacattcaacattgaggatttatattgcagcatgaggtttggacaacatggacatccaaactgtattatagaccatctaggcttcacagacacacacaaaacgctccagtcaaaaccaagatgatacacaatattcttatttgcatctggtgtattctgttatgacatataccaagttttattaaatttaaaaatactgactgggtgcagtggctcttgcctataatcctaacactttgggagaccgaggttagaggatgcattggggccaaaagtttgagactagtctgggcaatatagtcagatccaaacactacaaacaagcaaataattagccagatgtggtagtgcatgtctgtagtcctagctactcagaaaactgaggtaaaaagatcacttgagcccaggaggctgaggctacagtgggccaaacttatgctactacactccatcctgtgtgatggtaaaaatcttatcttaaaacaacaacagccattattttaaaaagattaaaattttgtataagttgctggctctttaaagtttacagaggaaacagagggcagcaatgtctgaataagtctgtatttagaaaacaacttgtacacatttactcatgcaatgttcattaagcaggtactgtgtgctcaagagtatgatacagagcacagcactgggaataacattatgtaattctcataacaccctgggagcttgtactaaggttttaataaatttcagtatttatataaaaggcccagcatttttatttcttcttgcatttccctatcatcaaaattttaaaaaactatcaagaataaaagctaaatagagacagatataagagatataaaaaggtagagtttaatgtagtttagagaaaatttcattctgtctatatttacttttttgtgacttgtggagcaactactggatatgcaggaatagaaaacaagttcctaaatagaatgtttctgcaaatagtggttttcatagaaaatttaaaaactaagaccctacaatacatactttatttttctcatttatctgcttttgggtttcaggaaattgttagcaccagctctagaaaggcagcaggattcaccagctgaaactctgatctcttctaatcagttctgtgaggcaagactccagggtagggtcagaactaaataaggcctccagaaaaggtcaatctgaaagaactgggccaggaagtaaaccctatgtagaattctgttctctatgtcattgggagatttccgttttcttttttctaatcttacctaaaagaaacttaaatcccagagtctgtaattttaatcttttctagccaatgccctgtcaactttatactacatgataatatgcaatttaaacaaatcccttcagtttttctagggtaattttattagaaaataaatacatacacttaacaaggtgaaagaataaaaattatatggcccagtgcggtggctcatgcctgtaatcccagcactttgggaggctttggcaggtggatcatgaggtcaggagttcaagaccagcctgactgagatggtgaaacctcgtctctactaaaaatacaaaaattagccgggtgcggtggcaggcacctgtaatcccagttacttgagtggctgaggaaggagaattgcttgaacccgagtggcagaggttgcagtgagctgagatcacaccactaaactccagcctgtatgacaaattgagattccatctccaaaaaaaaaaaagaaagaaaagaaattaaaattataataacaattcttctgttcataaatatcccttcagctgtggacttcagaagtcacaacaatataaagaaagtggcaaataaagcccaagattttggacacatctatttgttgtaccaaccatatgatgcataattcaattatttatccagttgctagtctagactgaaagtttctggattgttggaaccatgactgcttcatgtatttttttaatggccatataaattggaagctactagtttatctgtttgggtctccagatcttctccttgtttatcatcccagtaccaggaaactagagaaactcatctgggtaccaaccaaagacatcttttatatgaggggatgaacaaacacaggatgactcatttctcttacactgagacagaagcagaagtaatcactcttgtctgctctggacatcctcaaatgcttcaaagacacctaggtgactgagagaattcccattgacctggggctgatggcccagtgataagccaggttggagagactcaggccgattctaaataaaaaatggaactgccttggtggagctcaaaaacctggatcacccgtcctgatttgctagctcttgggtaaaagaaagaacaaaaatgctctactccagtatcacattttacaggtaaatttagttgtgatcatggttctggatactttgtggcctcgatctctcatgcctaagatgcttatttacacttacagattctgccatcacattctatttcctcctggatcctctcacatcactgtagcagggcaatgaacaaaatgtgaaaaatctcaaaatgccacactcccaaatgggagcttaagatgtcaagactgacatctcacagtgcagaaaatgccttttgttagttttctgtacatctccgtccaaagtccagaccttttttgtaaattccaggcagagggcagaccttatctgcagattctaggtaggatcaacctggctctgcatcctatggtgttacagtaagtggagtacaaaggagggatcccctcatagaggctgctctagcacattctaaataagtctaaatggaaaaaaaaaaagctgatgtaacatgaatgtaagtagacagtttatttgggtcaactttagattataaactgggagcaaatattcaagttgccttaaatctacactttgattagcagcagttacaagaagatttgtaaagacaacaagagaaagagagagagtgggctgacacaaagttgtttttcagaaaattttatttatttacagaaatgactttgattattgattagaaatatatggttatggtttagggtatgggatatagggtccaaggcagcattattagtttattttatggctacttgtggcaatagtgaacagtttcaagagataaatacatagttcaaaggggggagaaagacataactgcactttcattttaatgtctgagtttgataaccaaaagaacttgcatttttcagataaacgttttttatttcccaatctcaagactgggattcaaaatttggagctgcagatttagggcctgaatgtctgaagtagcagcacgtgttacctgcaaatttgtgagcattttagcaagaggaggaagaagaaagtagagatcctcttgtctacatgtctactcaatgcacacgttactttaattggatttgtgggtcccatgatctctgaatcagtttcagatctgaagatacaagagtcagtgaaagaggtaaaatgactgattactgtattgtgaaatttatagaaatctgatctagcctctctagaagtgactgtagaggactatagataccaaataggcagagacacaattcttcctgcatatttatgggacagcatgcactgtgctgcacaactgtgagttcactagaagcctgagagggagtctcctctggagtaaattctggttggcaccttatgtgtttatattatgtctggtaattctagacagtgttttgaaacaataattaaaagaaaagttttctccatccccagaagaatgccacaatagaacagaaagaaaatggttttattacacaattaaacttgaatgtgacatgcatcatagtcaatctgcttaacagactgcaataataaaaagacggacatcataattagtccacaagtagaatttacagcaccatgtcatacatagttcattctaaattcacctggagattgaagaggtcatctgtgtatgctaattgcttatattcaatgataaataatcttttcacatcttcataacaggaggtagtttagcaccttgaagccaggtacctgatgaagctaggctttcactctgctacaaaaatggttgaatagggttctatgtttttggctatttatattttagagcagtggttctgtactccctggcactgggctacagcactcctgcttgatttcacctggttgctagtgtcctcttgacttctaccatctgtcactgaggaacagcccagagcacagctcacattttatgtgaagtctatttgccacagcagcactctagtgtcacatcagagagggaagcctgagctgcaggaggagagcctgcaggcctcctgggtagaatgacacattcacaataatggaaatgagagcagtgtttcagcccatttctacttataatggtgaccagggaaaaatactgctgattttccagcatgaatccagatagagatagctccagaagttctcactgtgacagcccagcttattccaaaatcaagggttatgaataaggcttctgaaacagagacccaaagcactggagagaaaaacagatctccgtcggagcaagatggttctgagagaaaaaagttaaaatgatcttaagaaaaatctcagactacatataacattgattatgtcagatagaaaatattcccctaaaagaaatttctctctaaacacctaaagtgtacagctactctcaacatgagaaacatgagcattatgaagaaagggggcagattttcagaagaattttataaagtttcttttctatctctgctgttctctcatctcctagccattgaatgggggttctacgttgaaatatatttgacaacttccaacaacactttctgatgaagaaatagaatctgactgtgttcatatagtggaatatgttagaacttgcaacacagctaactgaagagctattatggtttttgcatggccacatcacctaaccttatttgtcctgcaatagcagcataccaatttagtgaaataaaatatactaaaatagtgtttactcaaaattatctctattgaataaagtaacaaacatgtcacactaatatctacttactgtaacaatttggtagtaaagttcctttggatattaaatataaatatcaaagtataaataattttaatgaactagtgttaatgtagatagcatttaaaaaattaaaacttcagttaaaacattttatatttcaaaagtataaataacaatattaaaataaccatttaagtgattcattcaaagtaagtagtgcagctttgtattggtactattgtagaaaatactgtttctggcttatgcctgtaatcccagcacttaagaggctgaggagggtggatcacctgaggtcaagagttcaagatcaaggtggtgaacatggtaacaccccatttctactataaatacaaaaacttagtcatgcagggtgaggcatgcgtataattccagctacttgggaggctgaggcaggagaatcacttcaacctgggaggcagtggttgcagtgagctgagatcacaccactgcactccagcctgggcaacagagtgagactctgtctcaaaataaaagagaaaatacagtttaatgtacatgaatgcagattgtccacaaacattacacataattatgctaattgttatgaagtaataaatagaaagcaagatacaactacagactccactgtttagtttataccctgaactgtttttgcttttgcagtataagcacttcagcctgcaaatattggataattaccttggattttcaggtttctgtcaaagaaatatagtatcttttagtctttatcattctgtattgctaaatttaatcttatctttgtgctaagcttctgtgtgctcttttttttaattattattatactttaagttttaggatacatgtgcacaatgtgcaggttagttacatgtgtatacacgtgccatgctggtgtgctgcacccattaactcgtcatttagcatttggtatatctcctaatgctatccctcccccctcccccctctgtgtgctcttaaaatgagctcttatctaaacaaatctgtctactttaaaggactaaaaatgaaaaaaataaacttttcagaaccgaaaacaaagcaataaatctgaattatcagataatctgaagacagaaaaaatgacaaaagtcttatttagttgttaatatgatttacatatatttccaaaagcagagaaaaatatctatatataatctagatccctcaacaaaagagggaatagcaaaactttttttggaacttttttttttttgtttgtttgtttcgagacggagtctcgctctgtcgcccaggctggagtgcagtggcgcgatctcagctcactgccggctccgcctcccgggttcacgccattctcctgcctcagcctcccgagtagctgggactacaggcggccgccaccatgcctggctaatttttttgtacttttagtagagacggggtttcatcgtgttagccaggatggtctcgacctcctgacctcgtgatccaccctcctcggcctcccaaagtgctgggattacaggcttgagccaccgcgcccggccttttttcagaactttttaatgagtttttgaacccttggacatctgaaatttgcacactgtatgcacttgaaagaaggtttatggggaagctgggtggggtggctcatgcctgtaatcccaacactttgggagaccaaggcagtcagatcacgaggtttggtggtcgagaccatcctggctaacacggtgaaaccgcatctctactaaaaatacaaaaaattagccaggcgtggtggtgggcacctgtagtcccagatactcgggaggctgaggaaggagaatggcctgaacccgggaggcagggcttgcagtgagccgagatcgcgccactgcactccagcctggtcaaccgagcgagacactgtctcgaaaaataaaaaataaaaaataaattaaaaaaagaaggtttatggggaaaaaaaacccagaagataaaaagatattacataaaatccataaatactcaagaccaattaaacagaatagagagcccagaaataatgccaccttcctacaaccatcagattttttacaaagttgacaagaagaatgtgggaagatttttctctgtaataaatggtgctggaataatagctaacactatgtagaagacagaaacttgaccccttcgttgcaccacatacaaaaatcaactcaagataaaataaagacttaaatgaaaaacttaaaattataaagaaaccctgcaagataacctaggaaataccattcttgacacagaaacaggtaaagacttcatgatgaaactacaaaaaccaactgcaacaaaagcaaaaattgacaaatgggacctatttgaacttaagagcttcttcacaggaaaggaaactatgaatagagcaaacagacaacctacagagtaagagaaaatagttgcaaattttgcctcttacaaaggcctaatatacacaatttattaagaactgaaatgagtttagaagaaaaaaccaagaaacctcattaaaaagtaggcaaaaaatatgaacggatgcttttcaaaagacatacatgtggctaacaaacattatgaaaaaaaggtcactgctaatcattagagaaattaaaagaaaaacacaatgagaaaccacctcactcacacacgtcagaatggctatttttaaaaagtcaaaaaataacagatgctggcaaagttgcagagaaaaaggaatgcttatactctcctggtgggggtgtaaattagttcaacaacttaaaaagcagtgtggcgattcctcacagaactaaaaacagaattatcatctgatccaggagcctcaaaactgggtatatacccaaagaaatataaatgtttatattataaagacacatccacatgcatgttcactgcagcactattcacaatagcaaagacacggacaggccctgaatgcttatcagtggtagactggataaagaaaatataatatggtcagatgcggtggctcatgcctgtaatcccagcactttgggaggccacagcaggtggattgcctgagcttagaagttcgagaccaacctgggcaacatggcaaaatcctgtctccacggaaaatacaaaaagaaaaattggcaaggcatggtaacacacacgtttagtcccaaggttgaggctaaagtaagccaatatcatgccatggcactctggcctgggcaataaatgaaaccctgtctccaaaaataaaataaaataaaagatttagtaaaaacaaaatatggtacataaatatcatggaatactctgtagccattaaaaaataattatcatgtcctttgcaagaacatagatgaagctggagaccattattcttacaaaactaatgcaaagtctgggcgcggtggctcacaccggtaatcccagcactttgggaggcggaggcgggctaatcaccggaggttgggagattaagaccagactgatcaacgtggagaaaccccgtctttactaaaaatacaaaattagccaagcgtggtggtgcgtgcctgtaatctcagctacttggaaggttgaggcaggagaatcccttgatccccggaggtgaaagttgcggtgcgctgagatggcaccactgcactccagcctgagaaacaagagcaaaactctgtctcaaaaaaaccaaacaactgggccgggtgcggtggctcatgcctgtaattccagcagcttggggggccctgaggagggtggatcacgaggtcaggagatcgagaccatcctggctaacacggtgaaaccccgtctctactaaaagcacaaaaaattagccgggcgtggtggcgggcgcctgtagtcccagctactccggaggctgagggaggagaatggcgtgaacctgggaggcggagctttcagtgagcagagatcgcgccactgcactccagcctgggtgacagagcgagactcggtttcaaaaaaaaaggacaaaacagcacaacaacaacaaaaacagaaaactaatgcagaaacagaaaaccaaatgcatgctattatttttaagtaagagctaagtaataagaacacatgaacacaaaaaggagaacaatggacactgaggcctagttgagggtggagggtgggaggactcagaggatcagaaaacatacctgtttggtgctatgggtagtacctcagtgacaaaataatctgcacaccaaaccctcatgacataattttagctatataacaaacctacatgtgtacaccaaaccagaaataaaagctaaaagaaaaaaaaaaatccctgcgtgggagagtacaatgcaggtgtatgaactgattttggctacagatagtggcccaggtggaaatgtactctgattgatttcggtgtgcatgcaggcagatgagattaaacaggtggctcagaaccttagggtggtggagaaaacaggttgctgctgcagattcagtgtctgggggtggggatatgccaggagacttgtagagacttgtgggttcttggcaagaaacacctggatcaaaaatgccatggtggccaggtgccatggctcacccctgtaatcccagcactttgggaggccgagacagatggatcacctgaggtcaggagtttgaggacaggaattcaagaccagcatggtggaaggcgcctgtaaacccagttactcgggaggctgaggcaggaggatcacttgaactcaggaggcagaggttgcagtgagccaagatcgtgccactgcacaccagcctgggcaacaagagtgaaactctgtctcaaaaaaataaataaataaataaaaatacaaaaaattagccaggtgtggtggtacacacctgtagtcccagctactccggaggctggggcaggagaatcacttgaacctagtaggcagagattgtgtaatggcctaaggcgttcaccttgccctttgcctagacagagcccattcatcaatacaggagaatttgtggagaaaatattaaacgttaaatttcaactcaattgaacatggacacaaacaatggttaccaagtcctgggacaggttatgtgagccccttgaggcattcatccagcactatttttgagaaatctctgtttgaaatgcttgttccttggtgccataaagaaatagcacttgaacataaatttaatttactcagtaaggccatttttactttctgcagaaagggtacacttaccagcagttttgccatgagtgtacaccgaacaaaggagacagggtcacttataaccagatgcatcaactctactcctgtgttgttttcactggctgggactggacctcacattctgtatttgtctcgattggctagcaatgtagaactttttaaaagaggcaaacgcagaggagaacagaggaaggaggaagtaacttgtagaatgctgagaaaggtaaaaacaccttcaaataaggaagaggaacaggctatgacctaatgcttgcttggaccagtataaacatgccagagcaaatatttaggctaaacagtgggagctaagaacataaagtacattgatttctttattatggctagcagatatttaagaatattagcacaggtctttcaatacattttacttctaagagaagttactatttactcctaattagatggggaggaaagtctttgaagagaaacctctactttacttttacatctctattttaatctattcctctacgttagttattgaaaaacaatagacaattgcaaaaaaacaagttcacctatttgtgttcctggagcccattcacaaagggccctcgtgactgggcctcatgccaaacaagttgttacaaaaagagctagggccgcagactgccctagcttcaggagacctctcctcatctgtgcacggttgagtgtccgactctggagcccaggctatcacttcccggtgtggtggtgaatcctccatagtctgatgagtgtttttgtctgactctggagcccatactgttgcttcctggtctggtgaggaatcctccatagtctggtgagtgtaaacatacacacacacacacacacacacatatatacacacacatatatgtacatatacgtatatacatatatgtatatacgtatatgtatatatacatatatacgtatgtgcatatatacatatatacgtatatacgtatgtgcatatatacatatataggtatatatacatatatgtacatatacatatatacatatacatatatacatatatacatatatacataatacatatatacatatatacatatatacataatacatatatacatatatacatatacgtgtgtgtggtcatgtgtgtgtatatatgtgtgtgtgtgtgtatatatatcacttttcccttctcccctttccattgcaattttcttattatatcaatttgcttattatatctgcattgccatttacataagataaagcttctttacccttaaaggtattgtgtgtgtgtctttctttctcccctcatgagtttcctgaacagaacaccatatttttcagaggctttatttgtttcttattattcttttttccttaatcttgcctgcatgcctaattttgacaaggtgctattcaaactctgatatcctttcttctgcttggtgaattcggcttcaaatacttttgtatccttcatgaagcataaaacaaaaactaactgggcctttggccaggcatgatggctcaagcctgtaatcccagcactttgggaggtcatggtgggtggatcacgaggtcaggagtttaagaccagcctggccaagatagtgaaaccccatctctactaaaaatagaaaagttagccaggcatggtggtggaggcctgcgtcaggcctctgagcccaagctaagtcattgtatcccctgtgatttgcacgtatacatccagatggcctgaagcaagtgaagaatcacaaaagagaaaatggccggttcctgccttaactggtgacattatcttgtgaaattccttctcttcgttcagaggcttcccaactgagcaccttgttacccccgcccctgcccacaagagaaaaaccccctttgactgtaattttccactacccacccaaatcctataaaatggccccacccctatctccttttgctgactccattttcagacgcagcccacctgaacccaggtgattaaaaagctttattgctcacacaaagcctgtttggtggtctcttcacatggacgcatgtgaaagcctgtaatctcagatactcaggaggctgaggcagagaattgcttgaacctgggaggcggaggttgcagtgagccgagatcgtaccactgcactccagactgggcaaaagaatgagactctgtctcaaaaaaacaaaacaaaacaaaaacagaatacagaagatctttcttccattttgactgtagaaaatgaatgtatttccactggaaaatgtggtagataattgatgagtaacatagattcgtcaaactatccgtttctctttttgcagggtaaatttgtgacagtgactatctcggttctgtatcttgtcttgatttcttagtttaatgctaaattatatgtggtgaaacgtggtactgttagatatgagttctaaatgtcttttcaaagagtcaatatgtcagtatgttcaattctttgccttctacttataaacttaacttcctcgtaaagcaaactttttcaattacctgctccacctgactcatttcaatcacctgctccaacctgactcattcccattacctgctacctgctctgccctgactcattttttccccacataaccattttttttcccgccaaaccactcacccaatcactgtctttaaattagctaagtggaattagtttagcctatgcagtctaaccctagccaataggggaacgacacagcaacaggggccatgcgcgtcagggataagaacccctttccctcccttgtccaggtgtgcactcaccattgctccatttgtaaaggcacacccttctatagaattaccttgccttgctgagaattaaaaagaaaattttatattcgagtgctatttcttttgcggcacagaaattttatttataacaatttgggggttcgcttgtgattacattcccctccaggggtggtctctggttctctctcatgaggaggtttgccctgcccccttgtggtggcctcaggggtgagaaatccagacccactcagtgggaaaaataaccggagctctcagcaacgaggggaaaaaaaaactggccagtaacctagcttaaaggatcctcatatactgtggcaacaactctgtgcacagacccaggaaggagaagctgcgggagccagaaaagtacttcattggtggtcaaattctggagagctaaatgtgtttgtgcgtgattgatcacaaacaaccctgcttgcgatgttgttcgtgtggatggtgacaagtcctactgctgaatggagtgagtgggtcctctctgtggttccgtagctacctcatatgacttagggtggatcctgccatgagatttattctgacatgccaacactaagaggggcctaattctcccttgggggagcagccagagagaacaacacgaatgggaagtgcgcaaggaaagagggggaaagggaggaaacaggttaactttctgggacaggcaaggagagacatttctggtgtcaggggttgagacttccgggacaggcaaggtgagacagccctggtttgaggggttgaggcttctgctaatttcaagggttgaacctcacacaacccccctttccttttatcttgggggaagaaagagtagctccactcccgctggtccctcccctaggggaaggagaaggagaggacagaacagcagcataagcatctgggagaggcacggaaagaccagaagagagatgagacagagagaaagacagaggggaaagagagagaaagagaggcagagagagagagaggaagagacagagacaaagagggagtcagagagagagacagaaagtcaaagagagaaagaaagaagtagtaaagaaaaaacagtgtaccctatttctttaaaagccagggtaaatttaaagcctataattgataattgaaggtcttctccgtgactctataacactctaataccaccttgttgtcagtgtaaacaagggcgcagcccgaaagcactgaggtcactgacaacctgtagccttcctatcaaaaatccttaacccagaaacctgtggatgaaggtaattcattcaatctgtagtgacaactgctttgcccgtaatgcccaaccttgtttttactaaccctgtttttagactccccctttttctcccttaatcacctagccttgtttccacatgaataaaaccctccctgggccaggtgcggtggctcacgcctgcaatcccagcactttgggaggcctaggtgggcggatcacgaggtcaggagatcgagaccatcctggctaacatggtgaaaccccgtctctactaaaaatacaaaaaattagccaggcgtggtggtgggcacttgtagtcccagctactggggaggctgaggcaggagaatggcatgaacccgggaggtggagcttgcagtgagccgagatcacaccactgcactccagcctgggcaacagagccagactccgtctcaaacaaacaaacaaacaaaccaaaaactctcccttagctgagaaagctagacaaactccatctggcccccttgatttataagacgttaaggactccttacccacccccttcttcaaggagttaacttgtgtaaacagattctcaacatatcaaaagagtccaattaactgataaggtactgaaacaaacaatgtatgaagttcccaggatcttgctcaaaagataacaccacaaagccttgagtctgtgtccggcatagcacccatatctaacatcttatgaaggatttagagcccccgcacctgctaccgttgcttttctgtaaacatttgtcttttaaattgtctgtttctctgtaatcatttgtccttttaatttttgcatgtttttacttctgtagaattgttgcatttgagctcccctccccttcctaaaccaaagtataaaagaaaatcaagccccctcctcatggccgagagaattttgagtgttagtcatctctttggccacaggctaaataaaggactcttaattcatctcaaagtgtggcgtttttctaactcgctcgggtataacatttggaggccccagcgagatatattccccaccgggtgagagccgggctttctccaggctcccccagacagatggctggcttattggggggtgccacctgaaaaatttttccaggtccgttaaaagtgaccatcttccggaggagagcagattgactaccgtgtgtttgcccacaaaattccacctctgagtcctcaacttctgaccctggggtcaggtaagtcaggcttgactttgccctggactcagtccatatcccaggtgctgggggactgagtcctggtttctggcaggccagtctctctctctctctctctgtctttctctctctgtctcattaaagactagtctcactctctgctctctttctcactctcactctccctctccctttttctatttctcatccttctcttgttcaggtttcttggagatctccgggaaaaaaaaaacaaacaaaactgttataaactctgtgtgaatggtgagtgattgggtgattgtggaagacaagggcttgtgcttgtcttccagtttgtagctccatggcgaaagctacacagcttgagtgggccctcacctgtggttccatggtgacctcgtaaggcttaagaggcatagcttgatctgagccgggggtttataccagcctgccagtactaagaggagcccaagtcccccaagggggagtggccaggtgggcatctgaatgatcccatcatgggaccccctccccttgtctgtctaataaaaactgtcataattgtttacatgccctagggccaattttttgttttatatttattgctctgctcagtgtctattgtcttgttcagtggttgtcaaagttttgtatgtcatgtcattgatattgcccaagacatctgggtaagaacttcttcaaggtccttagtgttgattttttatcacaggaggttaaatttctcatcaatcatttaggctggccacaacagtcctgccttttctgtcagaaacaagtgaggtgttgttacggaaacgagtgtggagaacattcgcctgattgggatttctggcagcgtgaaggttgctggtatttagattgtcataccctacatccaagagctgggctgcctctaggttaaactggtggtgggttgaaaatagccaccctgcagatttccttgcttacctcttttgtcatactgtaacttttcccatgcccttaaataggacactgtgtagggaaacctacacctgtactgctttacttcatttagatccttactctgttcctctgtggctactctcccaccttaaaaatgatccgagtggcctcatccctgccccttaccctgtacatctcattttccagtgccacagcaagttcagcatctccaggacttggctctgctctcactccttaaacccttacagaaaaaggctgagtttgagctatttgcctttgagtcatggagacaccaaaagtatttagggtacaggtccagaggaagagggagaacgcctagatccaactgacccaggagacctcagggcagcctctagtccccctccctcaatcttaaagctactgtaatgtggcaagtggtattagctgttgtggtttttctgctctttctggttatgttgattctgttctttcagtactccagccccctagggagtgagtttctctgtacatgctgggtttaatatctattctcaaatcttaataaattgccttcaaaaaaaaaaaaaaaaaaagagggaaactccttctctggccttgtaagtgttggagccctctccaatgtatgccacagaatttttctctcggtttctcagaggattatggagtctgccttaaaaaaggcaagctccggacactctgtgaagtagaatggccaaagtttggagtcgggtggccccgtgtagggtcactgaaactcacaattgtccaggctgtgtggcaggttgttactgaaactcccagccaccccgatcagtttccctacattgatcaatggctgagtttggtcaggagcccccctccatgggtgcgctcatgcaccattcataattctacctccaaggtcattctgagccagaccgcattttcacctcgaccctcagccagtctgacttccctgtactgcctccctctgaagaagaggagagtctccctcacccagtcccgctgccttacaaccagcctgctcccatagaatcatcctttgtctcctcaactacttcccctgtaggctcaccgcctattgcttcttgactgtgaccacggtaggaggaagtagcccctctactaccactgagagaggcacaagtccctctgggtgatgagcgctcatctcccttcttggtttatgtccctttttctacttctgacttgtttaattggaaaacccataatcctcccttctctgaaaagccccaggttttgacctctctgatggagtccgtactccggactcaccggcccatctgggatgattgtcaaaagctccttttaacccttttcacctctgaagtgagggaaggtatctgaagagaggccaaaaagtacttcctcacatcagccaataggccagaggaggaagctagagacctccttgaggaggtctttccctctacccggcctaattgggacccaaattcctcaagtggaaggagagctttggatgatttccagtggtatatcctcgtgattattaagggagctgttcagaaacccataaacttgtctaagatgactgaagttgtccaggggcctgatgagtcaccaggagcatttttagaacgcctccaggaggcttatcagatttacaccccttttgccccggcggctcctgaaaatagccgtgctcttaatttggcatttgtggctcaggcagccccagatgttaaaagaaaactgcaaaaactggagggatttgctggaatgcatatcagtcagcttttagaaatagcccaaaaggtttttgacaactgagagtttgaaaaacaaaaacaagcaacataggcatctgaaaaaggtgctgataaagtattcaaaagacaagcaaaaatcttagtgatggctatccaagaggggaaaaagaaaaggcccccatcacagagaaatggccagggaaccttgggttcccaccataaaggtaaaggagttgaacaggctcctctaggaaaggaccaatgtgcttattgcaagcagactggcagtggaaaaaggaatgcccactacgaccagaagaaaaatcagaaaagaaaaagtcctcaccctacctgtaatggaagagcctgatgactgaaggggccagggctccctcactgttggctcccaggaacccatggtaactgctacagtggggggccagcctgtacgcttcctagtagataccagggtggagcactcggtactgtagacccccttgggcagtgtctcaaataaaagtgactgtacaagtcactggagcaactggagctattcaagaagatcctgtcacacactcatgagaagtgagcttgggacagaaaagagtgacgcagtcatttcttgtggttccagagtgtccttttcctctccttggatgagacctgctccataagttacaggcctcaatctctttctcagctcaataggctcacctcacactaggaaatacagctccctccactgcccaatttctgctaagtacccctctgtcggaggaatagcttttagtttcaccatcacaatcaccggaggagaataataatcctcttcttttggacttacagacactttttccctgagtttgggccgagccaaaccctccaggactggctaaacaccattcaccagtggttgtagaactcctggccactgtcatgccagtccaggtgaaataataccccatgagtcagggggcaagacaggggattaatccccatatttaatgactgttacaagctggcatacttacaccatgtcagtctgcttggaatgctccattattgccagtccagaaacctggaacaaatgattactggctggtacaggacttaagggaagttaacaaatggactgttactgtccatccaaccgtccctaatccttatactctacttagcctgctctcaccagaacatacagtatacactgtccttgacctaaaggatgctttttttgctattcctctggaccccaaaagccagccgatctttgcatttgaatgggcagatcctagctcagggaacactacccaactgactttgactcagttacctcagggttttaaaaactcccccaccctttttggggaggctctccagcaagatcttgtaccattccgagctagtcaccctaactgtactcttcttcagtacgttgatgatcttttattagctactggaactatggacagttgcctgcaacatatgagagacctactttacctccttcaggagctcaggtatcaagtctccaccaaaaaggcccagctctgtcttcccagagtgtcttacttgggatacgagataaaccaaggaaaaagggcactcaccagtgcccagaaagaagccatcctatgaatccccgctcccaccaccaagagacaggtacatgaattcctgggggccatgggatactgctgcctctggatattggggtccacagagattgccaagcccctgtacactgctacaggaagaaacggcccactggtttggacagacaccgaagaacaggcttttcaaaacctgaaaaaggcattaactgaagcccctgctttagccctcccaaatatctcaaagcattttcacctgtttgtccatgaaagccagggagtttctaaaggggtgcttactcagactttaggaccctggagatgcccagtggcctatttatctaagaggctggatcctgtggcctctggatggccaagttgtctgcaagccatagtggctagagcaatactagtccaagaggctgataagttaactctgggccaaaatttaacccttatggctcctcatcccatagagactttactatgaagtgctcctggcaaatggatgtcaaatgctcacatcttgcagtatcagagtttactgttagatcagccttgtttgactttctcccccacaaggtgtttaaatccagctacactactccctgatccagactccactactcctgttcatgactgtcaggatctgttggaaactaccaaaactggccaacctgatcttcaagatgtgcccctagaaaaggcagatgccactgtgttcacagatggtagcagcttcctcgagcagggagaacgaaaagctggtgcagctgttaccatggagacagacatgttgtgggcttaggctttaccagcgaacacctcagcacaaaaagctgaattgattgccctcactcaggctctccaatggggtaagaataaacgtattaacatttacactgacagcaggtatgcctttgctactgtacatgtacatggagccatctaccaggagtgcaggctactcacctcagcaggaaagactcaaaaacaaagaagaaattctagccctgcttgaagccgtatggctccctcagcaggtggctgtaatccactgcaaaggacatcaaaaagaaaacacggccattgcccgtggtaaccagagagctgattcagcagctcaggacacagcatgactttcaggcacacctctaaacttgctacccgcagtttcttttccacagccagatctgcctgacaatcccacatactcaacagaagaagaaaaactggcttcagatgttggagcaaataaaaatcaggaaggttggtggattcttcctgactctagagtcttcatatccagaactcttaggaaaagtttaatcagccacctacattctaccacccatttaggaggagcaaaactagcccagctcctctggagcctttttaagatcccccatcttcaaagcctaacagatcaaacagctttccagagcacaacctgcacccaggtaaatgccaagcaaggtcctaaacccagcccaggccaccatctctgaggaaactcaccaggaggaaaatgggaaattgactttacagaagtaaaaccacaccgggccgggtacaaatactttctagtactaatagacaccgtctctggatggactgaggcatttgctacaaaaaaagaaactgcctgcatggtagttaagtttttactcaatgaaatcatccctcgatatgggctgcctgctgcaatagggtctgataatggaccggctttcacctcatccatagctcagtcagtcagcaaggcattaaatattcaatggaagctccattgtgcctatcgaccccagagctctgggcagatagaacacatgaactgaaccctaaatacactcttacaaaattaatcttagaaacctgtgaaaattgggtaagtctccttcctttagctctacttagagtaaggtgcaccccttaccaggctgggttctcaccttttgaaatcatgtatgggagagtgccgcctatcttgcctaagctaaaggatgcccatttggcagaaatatcacaagctaatttattgcagtacttacaatctctccaacaggtacaagatatcatcttgccacttgtttgaggagctcattccaatccagttcctgaccagacggggccctgccattcgttccagccaggagacctagtgtttgttaaaaagttccagaaagaaggactcactcctgcttggaagggacctcacaccatcatcctcacgacgccaacggttctgaaggtggatggaattcctgcttggattcatcactcccacaacaaaaaggccaacagagcccaactagaaacatgggtcccgaagcctgggtcaggccccttaaaactgcgcctaagccgggtgaagccattagattaattctttttatttacctctcttgtttctttttgcctgttatgtcctctgagccttcctactcctttctcctcacctctttcacaacaggacgtgtattcgcaaacactacttggagggccggtacctccaaggaagtctcctttgcagttgatttatgtgtactgttcccagagccagctcgtacccatgaagagcaacataatttgccggtcataggagcaggaagtgtcgaccttgcagcaggatttggacactctgggagccaaactggatgtggaagctccaaaggtgcagaaaaagggctccaaaatgttgacttttacctctgtcctggaaatcaccctgacgctagctgtagagatacttaccagtttttctgccctgattggacatgtgtaactttagccacctactctgggggatcaactagatcttcaactctttccataagtcgtgttcctcatcctaaattatgtactagaaaaaattgtaatcctcttactataactgtccatgaccctaatgcagctcaatggtattatggcatgtcatggggattaagactttatatcccaggatttgatgttgggactatgttcaccatccaaaagaaaatcttggtctcatggagctcccccaagccaatcgggcctttaactgatctaggtgaccctatattccagaaacaccctgacaaagttgatttaactgttcctctgccattcttagttcctagaccccagctacaacaacaacatcttcaacccagcctaatgtctatactaggtggagtacaccatctccttaacctcacccagcctaaactagcccaagattgttggctatgtttaaaagcaaaacccccttattatgtaggattaggagtagaagccacacttaaacgtggccctctatcttgtcatacacgaccccgtgctctcacaataggagatgtgtctggaaatgcttcctgtctgattagtaccgggtataacttatctgcttctccttttcaggctacttgtaatcagtccctgcttacttccataagcacctcagtctcttaccaagcacccaacaatacctggttggcctgcacctcaggtctcactcgctgcattaatggaactgaaccaggacctctcctgtgcgtgttagttcatgtacttccccaggtatatgtgtacagtggaccagaaggacgacaactcatcgctccccctgagttacatcccaggttgcaccaagctgtcccacttctggttcccctattggctggtcttagcatagctggatcagcagccattggtacggctgccctggttcaaggagaaactggactaatatccctgtctcaacaggtggatgctgattttagtaacctccagtctgccatagatatactacattcccaggtagagtctctggctgaagtagttcttcaaaactgccgatgcttagatctgctattcctctctcaaggaggtttatgtgcagctctaggagaaagttgttgcttctatgccaatcaatctggagtcataaaaggtacagtaaaaaaagttcgagaaaatctagataggcaccaacaagaacgagaaaataacatcccctggtatcaaagcatgtttaactggaacccatggctaactactttaatcactgggttagctggacctctcctcatcctactattaagtttaatttttgggccttgtatattaaattcgtttcttaattttataaaacaacgcatagcttctgtcaaacttacgtatcttaagactcaatatgacacccttgttaataactgaggaatcaacaatttgattccccgaaaacatgggtggtgaatgtaatgcccaacattgtttttactaaccctgtttttagactctcccttttgctctcttaatcacctagccttgtttccacatgactaaaactctcgcttagctgagaaagccggacgaactccatctggcccccttgatttgtaagacattaaggactccttacccacccccttcttcaaggagttaacttgtgtaaacagattctcaacatatcaaaagagtccaattaactgataaggtactgaaacaaacaatgtacgaagttcccaggattttgctcaaaagataacaccacaaagccttgagtctgtgtccggcatagcacccatatctaacatcttatgaaggatttagagcccccgcacctgctaccgttgcttttctgtaaacatttgtcttttaaattgtctgtttctctgtaatcatttgtccttttaatttttgcatgtttttacttctgtagaattgttgcgtttgagctcccctccccttcctaaaccaaagtataaaagaaaatcaagccccctcctcatggccgagagaattttgagcgttagcggtctctttggccaccggctaaataaaggactcttaattcatcccaaagtgtggcgttttcctaccttgctcgggtataacatgctaacagaagagagtatgagattattctgttaaaaaaatgatttatcattaaccaccgtaaatccccttaacccagcaggtttcccaacagggagtctaaaccttaattaccatagaaaagtctgaccagacctaggaggaactcccttcaggacaagatgatagatggttcctcctgggtgattgagggaaaaaggcacaatgggtattcagtaactgataaggaaactcttgtagaagcagagttaggaaaattgcctaataattggtctgctcaaacgtgggagttgtttgcatccagccaagccttaaagtacttacagaatgaggaaggagtcatctataccaattccaagttaatacggactgaacaaggtcttattaatagcaaataataattgaaatcccaaattgacaaggttttcaacaaaagtaaagtttgctgaaagttaacagtgttaacatgtattatcctaacttctaatcttgtggccttaaacagtctagtccacagacaggaaggaagttcgcattggagaagaatggttatcatctttgaaagaaaaaaaagggggggaggagaatttatgtaaaaagggatgttatatggtaaattcttgttctaaaataaattaactgtttgcttaaagaaagggatgtttgcaacaagtcagaaagttgaggcatgtgaagaattatttttgaaagccttgaaaaatgttataaagggaatttatgcaggaaatgttttataatttaaaagtaattaggcgtcctgaatgtaaaactattgaagaaacaatttacttgcaaggtgtgtaaggaaagtaaaatatacttttggtaaaaggattataaggaggcataagaatgtggatttttacctacacttaaaggttaaaaaaatttattttaaaggtctcagcaagttttgaaacattaattgtaaagaaaattctgtgtgtaaacatatgagctaaagttaaaggggtatcatccagtttttctgtgaactggacattaaaataaaagcacaacaggtttttcttaacttgctctttaacaaactttaacaactaacttgctctctaacaaaaattataaaaggttaaaaagagtctataaaaatcttaccttatggtcagacattaaaagttggataaatatgtctacaaggttttattaaagttaagtttaatattaataacactaaatttagcttatctcatataaaaatcatatgggaagcattttaaaatataaaatggtgtttgactttctttggtctgaaatctaataaaaataggtactaaagaaaatttctcaacaagaacgcaccaaggactataaagtccactgttgaggtccccacatttaaaacaaaagatcgatttcttagaaatcttatactaagcgtatcttccactttactttccctcaaaactaaaagtcttttagcacaggtaccacccctagaatttctggtaaaccagcaccagccttgggatcacgttctcatcaaagggtgaaaagaaggaaaactcaagtcagcctgggaaggaccctatcttgtgctgctaactgaggctgctgttcatactgcagaagggggatgcacacatcacacctgagtcaagcaagcgccattatcatcagaatcatgggccattgttcctggatcaagccctaccaaattaaagctaagaaaagctcagtctagctatactttcctttcctttcttaacccagtgcttatattcattactattcctaccactatcaactctaaccccactttagagcacttctatgatttaggagcagaggtcactggaaaggatcctatacgattctttaagatgcgcatttttctccctcctccacctcctacatctgccctgttcccaaacctatgacaccaaactatgcctcacctcatgccaaatgacaaaagcaagctctcggtagtagaaataggagatctgaggcaaaccatagccattgaaacaggatataaagatgtaaatgcctggataaaatggattaaagattccattcacgctttaaacagaagtggctgttatgcttatgcggatggtaggccagaggcccgggctgggcctttccactggggtggtcctcaaatcaagtggacacggagtgcatgaccgctgtttttcaagattccactgcctggaataacgaatcatgccaagctttctctgctatttcctgaagtccaacaccctgtgggtcagcccctgagcgccatccagcctccatcttccaaaaccaattttacatcgtgtctccaatgacaagggaaaaaatttggcattccgtggaaactttacaggatgcagtgaagtccggcatttcctagagctgacccattagtctgctcttattcatccctgagtggatgtatggtagtattatggaggacctttactggacactctgccagataattaagagcagtacttatgctctagttcaattggctatcccttttactctggcatttcctcaaccagaggaaggaaaaataagatatcataaagtgagagaagctccttatgggtcttttgactctcaagtctatttaaacgcaattggagtcccacgggaagtaccagatcaatttaaagcccaaaatcaggccgggcacggtggctcacgcctgtaatcccagcactttgggaggccgaggcaggcggatcacgaggtcaggagatcgagaccatcctggctaacacggtgaaaccccgtctctactaaaaatacaaaaaattagctgggcgttgtcgtcggcgcctgtagtcccagctactggggaggctgaggcaggaaaatggcatgaacccaggaggtggagctttcagtgagccgagatcgtgccactgcactccagcctgggcaacagagcgagactccatcttgaaaaaaaaaaaaaaagcccaaaatcaaatagctgcaagatttgagtcaatattttggtgggtggcaattaataaatgtagattggataaactacatctattacaaccaacagcgatttattaactgcactagaaatgctgttaaaggaatagctgagcaattagggcctattagccagacggcttgggaaaaatagaatagccttagacataatattaacatacagagaaggagtttgcatcatgattaaaactcaatgttgtaccttcatcccagacaacactgcccctgatggaaatacaacaaaggcattgcaaggtctgactgctctgtccaatgagttagccaacaattcaagtgtaaatgacccctttacaagatggctagaaaagtggttcagtaaatggaaaaaaataatagcctaaattcttacttcccttgcagacgtaatgggtatacttcatcttgtcaggtgctgtgtcacaccatgactccgtgagttggtgcagaggcttataaaaacagcacttactaaaacctcccttaattatccaccaccttatccatagaagcttcttttggaaaatcaagcagaacaactaagccaagacatgttaaaaaaaatttgaaaagaaagggctgtaaggaaatgcaagaggaggggttgttagatatgacttctaaatttcttctcaaagaatcaatatgtcagtatgttcaattctttgccttctacttttaagcttaacttcctcataaagcaacctttttcaattacctgctccaccctgactcattcccattacctgctacctgctctgctctgactcattctccacccggcataaccactttttcctaccaaaccacttaccccgtcactctctttaaattagccaatcggaatgagtttagcctgtctggtctaaccctagccaataggggaaagacacagcagcagggtccacgtgcatcaaagataagaacccctttacctcccttgtccgggtatgcgctcaccattgctccatctgtaagggtgcacccttctatagaagtacctcggcttgctgagaattaaaaagaaaatgttatatttgagtgctatttctttagccgcaccgaaactttataacagtaccttctacacgtgttcccatgtgactaatcttttactgcataatttttaatagaaataataaaataatacatatattgtctgaaaaaagtagatatatttgcttttcttatggaggtgtaaaatgcaagcaacttagccaggtactgtggctcatgcctgtaatcccagcagtctgggaggccaatgcaggttgatcacttgaggtcaggagttcaagactattaggcctctgagcccaagctaagccgtcatatcccctgtgtcccacacatatacatccagatggcctgaagcaagtgaagaatcacaaaagaagtgaaaacagccagttcctgccttaactgatgacattccaccaatttgtgacctggaggggcattctcagtacacttttgagtagaaatgttcaggaagcaggatagtagcctgctgggaacattagtaagaggggctgcaaagaagataatcaaaatattgaataaggtggggtcaggagtttgagaccagtctggtcaacaaggtgaaacactgtgtctactaaaaatacaaaaattagctggtggtcatggtgggtgcctgcaatcccagattctcaggaggctgaggtgggagaactgcttgaacctgagaggcggagattgcagtgagccgagatggcaccactgcactgcagagatggcaccactgcactgcagcctgggcgacagagtgagactccatctcaaaaataataataatttattttggccactgaagacaaactcagctgattgttttaatgagaataaggagaaaatatgcagagtgtgtatctggcattgtgataagtaagaaaagagagcattatctaagtcgtaatgggaagagtgtttctttccacaaactgttactggagcacacaaaggatgtagaattttattaatcgcaaatattttttatgattttgtgtttcatctttccccatctcttttctttgttctatgcatttcttccatttggcttttcctgggctgcattttatatatatgaaaccggtaaacgtaactacagtgttttgctgagttctgtgagtagctctacccaattattcaacttcagggaggttatgggagtccccagtttttaagcagcagctcagaagcatagatgggcccatggggtttgtgactggcatctgcagtgaggacaatgttgtggaactgagccctgaatcagggtctgtgctgactctgggtggtgtcagatttcaaatgttagacaatgagttggtgttggagaattatttgatgttcagcaaactacagatttggtgccagaaaaaagatatcatggagccctggcctggaataaaattctgggtgtttgggaatgggactgaaaacttagaggaaaggagcgctgatgacagacccccttttcttgcagctgttaccacaggattcccacccactcacaaacacacacactagacattgacatgtccacactcctcccaggactaggcaccaccctcaggaacttcaccacggcatttttgatccaagagtttcttgccaagaacccacaagtctctacaaatctggcatatccccctccctggacaccgaatctgcagcagcaacctgttttctccaccaacctagggttctggacctgcttttcacaatctcgtctgcctgcattcacacagaaataaatcagagtacagccccactgggccactatctgtagcgaaaatcagtccacttacctacattgcaatctccccgacccaggaattttttttcttttagctcttatttttggtttggggtacacatgtgggtttgttacacagctatgtcatggggtttggtgtgcagattattttgtccctgagttactacctgtagcaccaaacaggtatgttttctgatcctctgagtcgtcccatactccaccctcaactaggcctcagtgtctgtttctctctctctcttttttttatttttatttttgagaccgagtctcgtactctttcccaggctggagtgcagtggtgccatttcagctcactgcaagctctgcctcctgggttcacaccattatcctgctgcctcagcctcctgagtagctgggactacaggcgccctccaccatgcctggctaattttttgtatttttaatacagacaggatttcactgcgttagccaggatggtctctatctcttgaccttgtgatctgcccgccttggcctcccaaagtgctgggattacagacatgagccactgtgtctggcctgttctcctctttgtgttcatgtgttcttattatttagctcttacttataaataataacatgcatttggctttctgtttctgcattagttttcttttttttgttttgttttgtttttttgagaaggagttttgatcttgttgtttaagctggagtgcaatggtatgatctcgactcactgcaaacttcgtttcctgggttccaacaattctcctgcctcagcctcctgagtagctgaaattacaggagggcgccaccactcctagctaattttgtatttttagtagagacacagtttctctatgtcggtcgggctaatctcaaactcctgacctcaggtgatccgcccaaatcgacctcttgaagtgctgggattatgggcctgagccatcgcctggcctctgcgttagttttctaagaatgttggtctccaccttcatcaatgttattgcaaaggacatggtcattttttgtgtgtgtgtgtggccacccagtattccatgatgtttcgtttttactaaattttgtttagtaaatttttgtttttactaaattttttattttatttttggagacaagcttattgcccaggctagagtgccaaggcatgatattggcttactttagcctcaacttcccaggctcaagcaattctctcctacctcatcctcccaagaagctaggactacacacaggcattaccaagcctggccaatttttctttttgcactttccgtggagacaggattttgccatgtttcccaggctggtctcaaacttctaagctcaggcaattcacttgcctccgcctcccaaagtgctgggattacaggcataagccaccgcatatgaccataccatattaccatattttctttattcagtctaccatcgataggcatttagggcctgtccttatctttgctagtgtgaatagtgctgcagtgaacatacatgtggatgtgtctttataatataataatttatatttctttgggtatatacccaatgatgagatccctgggtcaaatgataattctgcttttagttctgtgaggaatcaacacactgctttttacagttgttaaactatttacactcccaccagcagagtataagcattcttttttcgctgcaacctttgtcggcatttgttatttttttgaaattttataaatagccattctgttggatgcgatgtggtatctcattgtggtttttcttttaatttctctaatgattagcgatgagcatttttttcacacgattgttagccacatgtttgtcatcttttgaaaagaatctcttcaagttttgtgatgttactttttaatgaggttttttttttttttttgtaaacttgtttaagttcttggtttttttttttttttttttttttgtcttttgtttttgagatggagtttcactcttgttgcccaggctggtgtgcaatggcccaatcttggctcaccgcaacctccacctcctgggttcaagagattctcctgcctcagcctcccaagtaggtgggattacaggcatgcagcaccacgccctgctaattttgtatttttagtagagatggggtttctccatgttggtcaggctggtctcaaactcccggcctcaggtgatctgcccacctcagcctcccaaaatgctgggattacaggggtgagccactgcacctggcctaagttcttaataaattctggatattagacctttgttagagaaaaagtttgcaaattatttttattctgtaggttgtctctttactctgttgatagtttcctttgctgtgaagaagctctttagtttaaataggtcccatttgtcaatttttgcttttgtggcaattgctttttgtagattcatcatgaaggctttgtgagtttctatgtctagaatggtattacctaggttatcttgcagggtttcttataattctaagttttacatttaagtgtttaattcatcttgaattcatttttgtacatggtgtaatgaaggggtccaatttcagtcttctacatagtgctaggtaattattccagcaccatttatgaaatagagaattgttcccacattcctcttgtcagctttggcaaaaatctgttggttgtaagagggtggcattatttctgggctctctattctgttgccttggccttgtgcacttatggatttttttataacatctttctgtcttctgtttttttcccccataaaccttctttcaagtgcatatagtgtgcaaatttcagatgtcccagagttcaaaaaatttttaaagttcaaaaaaaattttgctttttctcttttcttaggtatttagattatatgtagatgtttttctctgcttttttgaaatatatgtaaatcatattaacagctaaataaaccttttgtcattttttctcactccagattttctttatctagtacttcagatttattgctttatttttggttctgagggtttatttttttcatttttagtcctctaaagtagacacagatttgtttagataaaagcgcttttcaagagcgcacagaagcttagcacaaagataggattaagttttgtaatacagaatgataaagactgaaagatgctaagtttctttgacagagacctgatgatccaaggaaattatctaatatttgcaggctgaagtacttatactgcaaaagcaagaacagttcagtgtataaactgaagagtggagtctgtagttgtaccttgctttctatttattacttcagaacaattagcatagttatgtgtagtgtttgtagacaagctgcatccatataaattaaacagtattttctttttttaaattatactttaagttctagggtacatgtgcacaacgtgcacgtttgttacatacgtatatatgtgccatgttggtgagctgcacctattaactcgtcatttacattaggtatatctcctaatgctttccctcccccctccccccaagtattttctttttttgagacagagtctcactctgtttcccaggctggagtgcagtggcattatctcagctcactgcaaccgctgtctcccgggttcaagcgattctcctgttttagcctcctgggtagctgggattacaggcgcgcatgaccacgtgtggctatgtttttgtatttttagtagagacggggtctcaccacgttggccagcttgatcttgaactcctgacctcaggtaatccatccaactcactcttccaaaatgctgggattataggtgtgagccataaacagtattttctaaaattgtatgaatgtaaagctgcaatgctgacttcgaatgaatcactttaattgttagtttaatattgttatttatacttttgaaatataaagtgttttaattgaagtatagttgctatttagttatttagagacagagtctcactctttcacccaggctggagtgcactggcttgatctcagctcactgcaatctctgcctcctgggttcaagcaattcttctgtctcagcctcctgggtagctgggatgacaggcacactccacgatgcctgatttttttttttttttgtatttttagtagagatggtgattcaccatattggccaggctggtcttgaactcctgacctcgtgatctgcatgcttcagcctcacaaagtgctgggattacaggcgtgagacaccactcctggctatagttgcaatttaaaaaatgctgcatacattaagactagtttattaaaattattcatacttagatatttatatgtaatatctaaagaaaatttactaccaagttgttacagtagatattaggcttacatgtttattactttattctatagggataattatgagtaaacacaattttagtatattttatttcactaaattggtatgctgctattacaggacaatgaagacaggtgatgtggccacccaaaattcgtaatagctcttcagttacctatgttgcaagttctaatgtgttccactatatgaacacagtcagattctatttcttcatcaaaaagtattgttggaagttgtcagatgtatttcaatatagaacctccattcaatggctaggagaggagagagcagcagagatggaacaaaaacttgataaaattcatctgaaattctgccccctttcttcataatgctcatgtttctcatgctgagagtaattgtgcactttcggtggttagagagaaattgcttttaggggactattttctggctgacttgatcaatcttacatctaatctgaactttttcttaagatctttttaactttttttcctcaaaataatcttgctcagatcaagatctgtttttctctccaatgcttttgtgtttgtttcaaaagccctattcatatctcatggtgtctgaatgaggggagcttctctatatggactctatatagagtccatctctatatggactcatttggaaattcagcagtattttttccacatcaccattataaatagaaatggaggctgaaacactgctcacattcccatgattgtgaaggtgcaattctacccaggaggcctgcgtgctctcctcctgcagctcaggccttgttctctgatgtgacactagagtgctgctgtggtgaatggtgttcatataaattgtgagctgtgctctgggttgtgcctcagtggcagatggtagaggtcaagagaggacactagcaaccaggagaaagcatccagtgccaaggagtacagagccacttcttttaaatgggaaaagtttatttgtattgaatataaggaattagcatacagagatggcctctttagtctacttgtgaagtaattatggtgactatctttctgttgttgcagcctcttaagcagattgatgatgatgcatgtcacattcaagttcacttgtgtaataaaactgttttctttctgttctattactgtagagtttctctagggcttgagaaaatttttctttttctttctttctttttttttttgagacggagtctcactctgtcacccaggctgttagtgcagtggcatgatctcggctcactgcaacccctgccctctgagttcaagtaattctcctgcctctgtctccctagtagctaagattactgtcgcctgccaccgcgcctggctaattttttgtatttttagtacagacggagtttcactacattggccaggctgctcttgaactcctgacctcgtgatccacctgcctcagcctcccaaagtgctgggattacaggcatgagcaaccgcacctggccaaaaatttttcttttaattattgtttccaaacactgtctagaattaccagacatgatataaatgcataaggtgccaaccaggattttctctagagaagactttttctctcaggcttccagtcaactcacacgtgtgttgcaaagtgcatgctgtcccctaaatatgcaggcagaattgtgtctctgcctatttggaatctatagtcctctacagtcacttccagagaggctagaccacatttctacaaacttcacaggggagcaattaaccattttacctctttcaatgactcgtgtatcttcagacgtgacactgatatagaaactatatagaccagaaacccaatcagaataacatgtgtgcactgtgtagacatagagacgtgagaatctccgtgttccccttcctcctcttgctaaagtgctcacaaatgtgcaggtaacacctgctgctactccagccattcaggcctaaatctgtagctccacattttgaatccaggtcgtgagatttgggaaataaaaaacttttatctaaaaaattcaagtccttttggttaccaaactcagagagacattaaaataaaagtgcagttatttctcccctctttgaactatgtattcatctcttgaaactgttcactattggcacaagtacctataagttaaactaataatgccacattggacagtatatcccataccctaaaccataacgatatatatctaatcaataatcaatgccatatctgtatataaataaaaatttccaacaaacaactttgtatcagcccactctctgtccttctcttgttgtctttacaaatcctcttgtaactgctgtgaatcaaagtgtagattccaggcaaattgaacctttgctcccaggttataatccttaaacttgacccaaataaactgtctacttatattcatgttgtgtcagcttttttttttttatgtagacttatcatttagaatgtgctagagcagcctctatgaggggatccctcctttgtactccatttgctgtaacaccaaacgatgcagaaccaggtggattctacctagaatctgctgataaattcaggcctctgcctgggatttataaaaatggccagatattggattgagaatgtacagaaaacaaacaagaaattttcagcattttgagatatcaacataaacatcttacagcccccatttgggagtgtggcattttgaggtttttttacatcttgttcattgacctgctgcggttatgtgagaggctccaggaggaaatagcatctgatgccagaatctgtaagtgtaaataagcatcttaggagtgagagatgaagtccacaaaatatccagagccatgaccacaactatatttacctgtaaaatgtgatactagagtgtagaatattttagttttttctcttacccaagagctagcaaatcagaatagtgatccaggttctggagctccaccagggtaattccctattccatttacattcagcctgagtctctccagcctggcttatcattgaccatcagccctgcatcactgggaattctctcacaatcacctaggtgtctttgaggcatttgaggatgtccagagcagaattatgtcaggctgacaagaacggttaattcggcttctgtctcagtgtaagagaaatgagtcattctgtgtttgttcatcccctcatagaagaagtgccattggttggtacccagatgagagtttatccagtttcctggtacttggatgataaacaaggaggagatctggagacctaaatagataaactagttgtttccatttcatatggccattaaaaaaaatgaaacagtcatggttcctacaatccagaaacgtttagtctagactagcaactggataaataattaagttatgcattatatggttggtacaataagcagatgtgtccaaaatcttgggctttatttaggccgctgtctttatattgttgtgacttctgatgtctacacctgaatgatatttatgaacagaagaattgctataatttctttttttatttttgaaatggagtcttactctgtcaccaaggctggagtgcagtggcacaatcttggctcattgcaacctctgccacccgggttcaagcaattctcctgcctcagcctcttgagtagctaggattacaggtgcctgacaccgcacctggctaatttttgtatttttagtaaagacggggtttgaccatcttagtcaggctggcctggaactcctgacctcgtgatccagccaacttggtcacccaaagtgctgggattacgggcatgagccaccatgcccagccatataatatctaattttttttaccttgttaagtgcatggtatttattttccaataaaattacactagaaaacctgaagggatttgtttaagttgcatattagtatatggtataaagttgacagggcagttgctagaaaagattaaaattagagaaattctaggatttaagtttctttcatgtaagcttagaaaaaacaaaactggtattaccccagtggcatagagaacagaattctatagggtccttaccctgttccagacctgttcatattcacacttgttggaggccttatttagatctgaatctaacctggagtcttgctctcagaactgattagtagagatcagagttttggctggtgaatcctgctgcctttctagagctggtgctcacaatttcctgaaacccaaaagcagataaatgggaaaaatgaagtatgtattgtagggtcttagtttttaaattttctgttaaaaccagtgcttgcagagacattctatttagcaacttgttttctattcctgcagatccagtagttgctccacaagtcacaaaaaagtaaatataaacagaatacaattttctctaaactacattaaactcttcctttctatgtctctttcatctgtctatatttagcttttattctttacagtttttttaaaaatttgctaacagagaaacagaagaagaaataaaaatgctgggccctttatctaaatcttggaaattattaaacccttagtaccagctccagggtgttatgacaattaaatcacataatgtgttacgcccagcacagtgctccatatcatactcttgagcacatagtacgtgcttaataaacattgcattagtacatgtgtacatgttttttaaatccagacttattcagacattgctgccttttgtttcctctgtaaactttaaagagccatcaaagaataggaaactttaggatggagatgggttgtccttatttgtacaagaaatatttggttgtgacaagagttctaagtgtaaggaaccctgtgctgtgcctgctttctctaactaatgctaataatgagcccagtggaagaaacatcagcattgacagggaacttgtttaaaacacccattcatggacccttttcaaacctgcagaatcacattacataaagtggggccaaaattaccaagtgatttataagctcgttaaagcttgagaggcaatgattagctcagtggttatcagcccaggcttctcattaggatcacatggccaatttgcagaaacctcttgtgccctccccacagcttctgtttattgttgtgggtagaaatatccatgttgtttttttttgcctttttttttttcctttttgtggagaacggggtcttgctatattgcccaggaaggtctcaaactcctgggctcaagctatcatcctgcctctgcctccctgagtgctgggactacaggtgtaagccactgcatctggctccatgttactttaatgaagggcctcatgtgactctaaggtgaggtcagaatcaagtatgagggtttcaaaatacattcatgagagttaagttccaactatgccctaaagtgcggtcacaggggcagttctgtttgggtttggtagggacaggtcagtgtggcacatatttgcattactgtagcagaaattgctggtgtctgtggcaggggagggcaactgaggacagaaaaggagaaacttatatttttatcttcatggagcggctcattgttcctgaatctcttctgttttaaaggacagaaatgagtggactttttctgtctttttctgccagttgatgtcatgctagcaggtacatgtgtggtactgacacctttaaaggcatattctcaacatgcaggtgtaatttatccagagaatctcatctgagaagaaattccagagaaggagaagaaagaaaaaaaatggcttttcttcaggtaaacaggtgtcagatgaagagctgtgtccactctgcctcctggactgccatgaatttagtacttacaaaactttatttctctacttgtgtttttcctccttaatgagtttgatttaactacttcttaaaattcttatgatagtcaagagtctctgagaaatatttctttccaatatccagtagccttctctacattttctatgttatagcttcttatatgacatgaagaattctcagcaagaatttatgatacacagtattaaaaatgttccctttgtggctgttgaacagggaaagatgtgggtactcaagatctctattggggaaacttgtggtccatagtacacatggagaacatgtcatgttgaggctccatctgtgtgttccattagctctatgcagaacaggattaagaaaatgctgatttaaatgaaatggaatttattaaccagaaagttctgaaaaaagttatttggagatatctgttttctaggttgccaaatgaagcctatttaaaattactattaaaattacacaacataggagttatctggattttgaagtttgtatacaactgattttttttatggttaaattcagactataatttacttcttttgggagaaatatttcaacactgatgctgtgttcttctatgtgaattagcacatcataaaaatttgtcctagtgcagttagtggttaaagattcacttggtggaatagctctctgatgaattattttcactacagagttaattatttttctcttcatcatgaagtatctttatgcagcggatgtgcatagaccatcacatttaatctggcagctgttcttttttctaattttttctacataattttctttggaaaatgaaggctttcatctttgcttacaggctagaaaaactgggaaaaacatgggctcttccacttactggatgtctgccaaaatatccttcttgggccaaaaacattggcattactggtgagcttgttagaaattcaaaaaatcggccaagtgctgttgctcaagcatgcaatcttaccacgttgggaggccgaggtgggtggatcacctgatgtcaggattttgagtccagtctggccaacatagagaaaaccctatgtctactaaaagtacaaaattatctgggtgtggtggtgcatgactgtaatcccagctactcaggaggctgaggccggagaatcacttgaacccgggagacttaggttgcagtgagccaagattgcatcactgaacttcagcctgggcaactagatcgaaaccctgtctcagaacaaaacaaaacaaaacaaaaaatttgagaggtgccttctaactcaacatgtcttttccatttgaaaaatattcacaactcattctgtatgatgtaaatatagcactcaaaaatgtacatgtttatgtttatggccttaattttatactttattatatggaaaaatataagaactgatattgtggatgttatgctgctcttttttctcagagttagaggatatatcagagaatatttctgtgttgatattattttattggataactttagtcagtcgaataagtcagaaccagttctctttactctctcatttcaccttaagtcaaataaaaaattctgcctatggccacatggtgaaaatgtgtgtgtgtgtgtttttcagggaccattgcaatttagagatgtggccatagaattctctctggaagagtggcattgcctatacactgcacagtgaaattgatatagggatgtgatgttatggaactacagacacctggtcttttttggtgaagatagcattaatatataattcataatatactctgaagagtatattatttctcttttttatagaatgtattatagtagtttattctttgcataaaagagtttcagcgctgggcatgatggctcatgtctgtaatcccaacactttgggaggctgaggcaggtggatcacgaggtcaggagttcaagaccagcctggacaagatgctgaaaccccatctctactaaaaatacaaaaaattagccaggcatggtggtgggcacctgtattcctagctactcagtaggctgagggagagaattgcttgaacccgagaggcagaggttgcagtgagccgagatcgggccactgcacttcagtctgagcaacagagtgagacttcatctcaaaaaaaaaaaaaaaaaaaaaaagagtttctgatccccctttatttgtaaaatcttcagaatttggtaatataggaaagaatttcttcaatatgttttatcttaatccaaactttccacagtactgagatgagctgtattcttcactctaaattagtggtacttccagaaatttagcggcataaaatattgttgccccacctgaaaatctaattgccaccaccaatttttgattcagtagtaccaggtattaaaattaagaaacctacaaattgaaagtattttctaaatatttagaaatttcttttataatttagtattttggtatcaatttactattatattttatcacatcctctctgctgagcacattactagcttgtagttggagaatatgagcaagattcatgttatttattcttaataaaacaggtattgttttctctaagccagacctgatcacttgtccggagcaaggaaaaaaacctttgactttgaagagacttgagatgattgccatagccccaggtaggtgcgagtgaaaatgaatacaacagatgacacagataagaggtcccaaggtcaaagagaaagccagtccttagaatgtgactggggaagctgagttccaaaggaaatagttcctgggcatctggggttttttgtttgttttatttttttaaattttgctctcagaaaggggcatcttttttgttacgctttttgcttttttttttttttgagatggtgtttcgctctcgttgcccaggctggagtgcaatggtgtgatctttgctcaccacagtctccacctcccaggttcaagtgattctcctgactcggtttttctagtagctgggattacaggcatgcaccaccatgcccggctaatgctatatttttagtagagatggggtttctccatgttggtcgggctgttctcgaacttccaaactcaggtgatttacccacctcagcctcccaaagtactgaaataacaggcgtgagccaccacacccagccctgctttatgcctgtaaattctctaaggattctatttttctttcagtgagcttccttcaggtttatactgaaagcaaaattcctcttcatggcatataagagactgcacaatctggctgcttttttattgtttgcaggactcacaaatatttgcatgattttgagaaactaaaactcttttttaggttttttttgcatcagatttgaaatgtgtgagagcagtagtttcttttgcatttttttgttcatttttctgcacagtcctttctgtttttattgctagtcttgaaatatagttggcaattataagtatgatatccttctgctttgctctttttccttgattgctttggctattccaagtttattttagtttcatgtaaattttagaattatattttccattactgtgaaaaaaatagcactgcaattttgattggcattatattgaatctatagatcactttggataatatggcactttagtaatatttattttcaattcatagacataaaatattttaaaatttatttggatcttccctaatttttttcatttttttattgtaaagatttttttacctccttggttaaattttttctcagacatttattatttaatactatagcaaataagatttctttcttttttttttcttttagagatagagtcttgcactgtcacccaggctggagtgcagtggcatgatcttggcttactgcaaactccgcctcctgcgttcaagcaattctcttgcctcagcctcccaactagaagagattgcaggtgcccaccatcaggcccagctaatttttatatttttagtacagatagactttcaccacgttggccaggctggtcttaaactcctgaactcagatgatcgacccccctcagcctcccaaagtgctgggatggcagacgtgagctaccatgcccagcatcttcctgtattttatcagatagttttaagtgtatgaaatcatacgtatacttgtatgttaattttatattttgctaatttactgagtgtatttggtttagacaggttttaatatactgtttatggtttctttgtgtttatttttgaggcagaatctcactttgtcgcccaggctggggttcagtggcacaatctcaactcacttcaagctccacctcccaggttcacaccattctcctgcctcagcctcctgggtagctgggactataggcacctgctgctgtgcccggctaattttttgtaattttttttttttttgtagagatggggtttcactgtgttagccaggatggtctcgatctcctgacctcgtgatccacccgcctcggcctcccaaagtgctgggattacaggcgtgagccaccgcgctcggccctgtttatggtttcttaaatataaaattttatgatctacaaactgcaactttttacttttctttaatttcaatggattaaattttttcaactaattcttctgccacatacatccagtgctagattaaaatagaagcaatgacaatgggcaaaatatagttttatattggtgtctgaatttgatggagcaaacacctcttcaaattttcataaactgatttcagaagataaaaatcttttgttggacccttagggtgatgataagctctctgaatttgtagtgaagaggggttgcagcttggtcacaaggctgctgggtctgctttagggtccaccattagttggcttgttacaggggcttggatagttgtaattcccattttatttgtgaacagaccacatgtttttcaggactttgctccatagggcagacactagggcaggtttttgcagtcggatctgcatatggtgggcctcgtatcaggatgcggatgagtgtagctttcactgagtaccagagaacatttcctcaggtaactgtgtgggtttctatgtaggcagaactgatcataaactgaggctcaggtaactgaaactgagtcattgaactgcttcacagaccccagtaaaggccaaggtttgcaggcctgcctacatggctgtaaatgggtgccttcctccaggtctctggaatggcaggaccttggccagactgtggctggtaggagtttgggataattacagagtaagttcagaattctcagtgggatcaagttgggtgaaccctatcctggtctgtagccaagaacaggggtcatgtagttttccacctgaatgagggcctgccttccgaatagaacacttctcaaccttaagctttaacagtttttcacaactccctccctggatctcaaatctctcatagaggcccttattttggagatgacgtcttgcttcataaccaaggctggtctcgaaatcctggcctgaagcagttctccaaccttaatgtaccatgtagctgtcattacaggtgtgagccataatgactggttctctaataaaggcactttttttttcctctgagatggagtctcactctgtcattcaggctggagtgcagtggcgccatctcaactctctgcaaactccgcctcccgggttcaggcaattctcctgcctcagcctcctgagtagctaggattacaggtgtgtgccaccacaaccgcctaattgttttgtatttttagtagagataaggtttcaccatgtttgccaggctggtcttgaattcctgacctcgtgatctgcctgcctcagcctcccaaagtgctgggattaaaggcatcagccacagcactcagtcaataaaggcatcagggatggctgattttttttgctgtaagggaatatgaaaatagggctcttttaaccttattgatgtcactctccctatacatttttactttctattttctatttcaaattgtctgtaactttagattcagatatttaggacaatatgctagaatttgcatggtatgcctgaagtaaattacataactagcaggcactccatatttaccaaaatacttcgttataaattcaaatttgttgcaggcaaaaaggaattacagaattttcatttacattcttcagactatatctaaagaataacagtttatttcctaatatttgtttcacatatcacagtgcctaaccctattctgccaaatatatatgtatataattctttctatgtttaacaatttaagtctattttttgcttctaaagttggattacaacagtttcattttgtgtaataatagcatatattttaaacataaagagtaaccctagtttcttttaaatgcttattaaatgtttctcattaagtcttctatttattgttttgggaaaaaaagtctttctgctacttttgttatccacataaaaaaacatatcctctacaaataataattaacaaatgtccagttttattcattacaaatattaacatcatttttcttttatttatcctttatgcatcattttatacattcacacacacaaagaacattaaaaatatatccaattattcaattttggttgaattttcattaaaataagtgttaaaaatatttatttgttttctgttttgagaaggcttttattgttgtactccagagtgttatttctggagacaaagttgcctgtgctttaatagggagattcctgggagaatctaaaccataagcaacaaaattttaagttaataaattcaagacaaagcagaaagtatagatttgctttcagcattcccgaggtgtttagatttttattagtcacctaattaaaatattgttccaataattgttcttttcttctgaaaataagcagaaactcatacttacacaaaaacacttcataattttcttacacctaaggtttatcttcagaatgatatgtgtatatttaaccctgtgcaaattaacactaaaagtctatgtttgcaggcagagaccacatgttcaaagaaaactatataacaaatatttttaaataatttttcaggattttctatggatttctatttcttttttttctgagatcgagtctcactgtcacccaggctggagcacagctgcaggatctcagctcactgcaacctccacctcctgggttcaagttattctcctgcctcagcctccatgtgccaccatgtctggctatattttgtatttttagtagagacgaggtttcaccacattggccaggctggtcttgaactcctgacctcagggaaaccacctgtcttggcctcccaaagtagtgggattacaggcatgagccactgggctgggccatattctatttctgtataatttttattatgaccataaaaataacaatgtagttaataacaatttaattgtacattttaaaataattaaagtatataattacactgtttgtaataaaaagtataaatgttagaggtgatggataccttatttaccctaatgtaattactacacattgtaggcctgaatgaaaatatgccatataaggcataaatatatacacatactatatacccacaaataccaataataaatttcaataagaaaaaagaataaaaatctaacctatggaaacaatattcttaaattcatttgctgtttaaagccactcgcaaagtgattactagagatgttatttcactatgtaccaaatagtatgttgctaccatcttttacctacacccttgagtaaggtgggataggttaaagttagtggaataatgcttcattaaatgcacaatagtcttaacatgttaaaaaaataaaattaagtttgcacataatctaatgatttttaaatatactgcattttattacataaaagtacaattaataatatacttattttaatatacttttaactataattaacaattccaccataatgtagaaaatagtctgaacacctagcttatacattacttaatataggttaactacaatgagcctctccacttatcttttcatcatgcatcttacattttagtgtccttacttttatagaaaaggttataaataatgcccaataaaaaaagaatctctggtatctctgatgcagcaaaaattgctcatatgttttcacatgtgaataggaataaaataacagcataaagtaatttgaaagctgtatgacatcattattcacttttgaaaaactttttttcaagaaaacaagtatacttttaatgtaattacaatgcttccaaaaatctccttttaaagctatatacaaataattttaaacaattttttatttttatatttatcaagtgtggcaaccaaataaaggctttgtcacattttatacttttctacagtttcacactagtataatttttttatgtatagaaacgttggaggtgttgggaacagcactgtcacatctttcaggtttgtagagttcctcttcagcatgaattattgccatgtctcttaagaattgagaacttatggctaggaatggaggctcatgcctgtaatcccagcactttaggaggccaaagtgggtggatcaactgaagtcaggagtttgagacgagcctggcaaatatggcaaaaccccatctctactaaaactacaaaaattagctgggtgtcattgtgggtacctgtaatcccagctacccaggagacgaaggttgcagtgagccaagatcatgccattgcactccagcctgggtcacaatagtgaaactgcatctcaaaaaaagaaaaaaaaaattgagaacttgttataggctttgccaaattcttcacacctgtagggtttctgtccagtatgaattatgtgtaataagtgttgagaacttccttacaaagaggtttgtcagcctggtgcagtggcttgtgcctgtaatcctggcaatttgggaggctgagatgggtggatcacttgaggttggcagctgaagaccagcctaaccaacatggagaaaccccatctgtactaaaaatacaaaattagccaggtgtggtggtgcatgcctgtaatcttagctacacaggaaggctgtggcaggagaatcgcttgaacctgggagatggaggtgaaggtgagccaagattgcgccattgcactccagcctggacaacaagagtgaaactccatctcaaaaataaataaataaataaataaataaatagataaataaataaataaagctttgttacagtattggtttctgtccactatgaattctcttatgtttattgaagtctgaggaccagttaaaagctttgccacattcttcacatttgcaaggtttctctccagtatgaattgtcttatattcacttagagttgaggatgcagtaaaggctttgccacattcttcacatttgtaaggtttctctccagtatgagttctcctatgtttatgggggcttgaggaccatgtaaaggtttttataccatttatagcatttctctccagtatgaattgtcttatgtatagtaaggtgtgaaaaatggttgaaggctttgccacattcttcacatttgtagagtttctctccagtatgaatcttctcatgttcactaagggttgaggataaaataaaggctgtgccacatttatcacacttgtatggtttctctccagcatgaattttcttatgcctagtaaggtgtgaggaatgggtgaaagctttgccatattcttcacatttgtagggtttctctccagtatgaatcttctcatgtttactaagggttgaggatgaaataaaggctttgccacatttatcacacttgtatggtttctctccagtatgagttttgttatgtgaagaaagggttgcaggatgtttaaaagctttgccacattctttacatttgtagggttgctctccagtatgagttatcttatgaatagcaagctgtgagggccagttaaaggctttgccacactcttcacatttgtaggatttctctccagtatggattatcttatgttcagtaagcgtagaggaatacttaaagccattgccacattcttcacatttgtagggtttctctccagtatgagttatcttatgtgtagttaggtgtgaggaccatctgaaggctttgccacattcttcacatttgtagggtttctctccagtatgaatcttctcatgtttactaagggttgaggaaaaaataaaggctttgccacatttatcacacttgcatggtttctctccagtatgagttttcttatgtgaagaaggggttgtgggatggttaaaagctttgctgcattctttacgtttgtagggttgctctccagtatgagttatcttatgaatagcaagctgtgaggaccagttaaaggctttgccacactcctcacatttgtgggatttctctccagtatgaattatcttatgtgtagtaagggtacaggagtacttaaaggctttgccacattcttcacatttttagggtttctctccagtatgagttatcttatctgtagtaaaggttgagtaccagttaaagtctttgccacattcttcacatttgtagggtttctctccagtatgaattttcttatgtgtagtaagggttgaggactggttaaaagatttgccacattctatatgtttcaaaggtttttttacagtacgtcttctgtctgtttgaatttgaaaattgatgaaagactttcacatatttatcacattgaaatattttgcaatgggtagttgtcaagcattggttaagcccattataacctcttttttgcaccttacactcatccacactttcacatcctttttttaactgtaaattgccatgtccacattttttatatcttctcagtatcactttttgaaaagaatcttttatgttctgctctagccaaagttcttgggcaaaatgagaacaaataactgaaagagacaataaaaacacaacacttcaactgctagactcagataaatatattttacaaatctaacctataaaatttcacagactacctaaggaagatgacatggcaaaataccacaagctgtaatttcttcctggacatataaatgtaacaaaaacatactgaccaaaatacaatttgtaaaaaatgtataagtgaattaagtgtgtgaagggtcccaggtgagcacaatgcaaagagccacatagaagataaagaaaagcctgttacttatacccaacacagctcttccatatctccagtataactctgtgcctttaaaagtaaattattggcctggtgtggtggcttgtgtctgtaaacccaacactttgggaggcagatgtgggtgaatcacttgaggtcaggagttcaagaccagcctggccaagatggtgaaaccccatctctactaaaaatacaaaaaattagccaggcttagtcatgggcacctgtaatctcagctactggggaggcggaggcatgagaattgctggaacccagggggtggaggttgcagtaagctgagattgcaccactgtactctggcctgggtacagagtgagaccccaccacaaaaaataaaaattaaaaaaaaaaagttaattgccaaccaggcatgatggctcatgcctgtaattccagcaatttgggtgaacaagatggaggacaaccagaggtgatcagcctgaccaacatggtgaaacctcatctctactaaaatacagaaaattagccaggggtggtaataggtacctgtaatcctagctacctgggaggctaaggcaggataattgcttgaactctggaggcagagattgtactgagccaaggtcatgcctctgcactccagactagttaatagagtgaggctctgtctcacacatacacacaaaaatgtaaattgccaactcctggtttcttttttaaaaaacaagaaaaatattgacacatacatctttatttctggcttctaggggcttttttagacactagttgatatgtcccatgacacaaaatgccaaaaaaaatggtgatatatgttagaatgacactttgagtctgaaggtaaattatagagaagcagagaaactgcagtaacccaaacagggaatgggtgtagtgaatgattacttattattaactaaacaataaacataaaattttaaacaagacacaccttaaaaacatgtttgaggaattctcagaatctagagtcaagacaattgatttcagactatgccaggacagagccatattataaagactgtaacaggtagctttttgttaatgtcctaatctcaatcaaaggttataatgtataccaaatattagagcaacatggccccatcaaaaaaattataaaattttcaaaagcaaccataaaaagtatgtaaagtaatttttaaaattccaaatgaattgaacagcccagtgttggtagctcattcctgtaatcccaacacactgggagatcaaggtgggaaaatcacatgaggtcagaagtttgggaccagcctgagcaacatggtgaaaccctgtttctgctaaaaatacaaaaattagctgcgcatggtggcatgtgcctgtaatcccaggtacttgggaggttgacacaggataattgcttgaatccaggaggggaaagttgcagtgagtggagattgtaccactgcaatgcagactgggcaacagagcaacactgtctcaaaaataaagtaaaaaaggccaggcacagtggttcatgcctgtattcctagcactttaggaggctgaagtgggtagatcatttgaggtcaggagttcaagatcagcctgcccaacatggtgaaaccccatctgaactaaaaatacaaaaaattatctgggcatggtggcaggcacctgtaatcccagctactcgggaggctgaggcaggagaattgcttgaaccaggaggcagaagttgcagtgagccgagattgagccactgcactccagcctcggtgacagaaaaatactctgtatcagaaaaaaaaccagaaacacagacaactattgaagatcagaaaaatgagaacaaaaagaaatactaaagtaaacacacacaaaaaattgtggatataaaaagtacaaaaaataactgaaaaatttattacaagaaaatacgtaaacatgaaaaagctgaaaaaacaaacttagatacacacaaatatatttataacacccaaataagcaaaatttcaaaaatcacatataagaatagaattttgggtgctgaagataaaaatgatgttccgtttataagcatagtctcatgagataaccagtgaatttatttaaaacatttttgcatgtcaaaaggaaactgatattgttaaatttataataataataaaaaagctgtcaaatgggaataataccatcagcaaaattgtactatcagataaaaagaagtccttccaaaataaccaaatcctgagaaagtatattggcactgcatacaccctacatatcaaagatgctgaaaggagtttcttccactgaaaataacataatgtaagaaaacaccacataatcatatgaaaatacataactttctggaaaagatatgcaaattcacaaaaatggtatttcttacttaacattatcataatgatacagaaaacatttttaattattctctaaatttaaaagataaaagtacagaaattattaacatctgttaatggatatacaacataagaaatataattaacaaaatcaataacaaagttgaaggcagatgttatgatgaataattttggtatgtaactgaagttaattttttaccacattaaaatacatttttggatattttagaggttttatggagtcccctggtaccactaagattatatctgtagagctacacaaaagtaaataagagggaactgaaagcctatcaatacaaaaataaaaaaaacacaaaaaaggcagaaagagaaaatgagagacaaagacacaacaatcaaataaaacaattaataaaaataacagtaaatttttctatttcagaaaactatttaaatatatatgttatctttccaatcaagaaacatactttttttttttttttttgagatggagtctcgctctgttacccaggctggagtacggtggtgtgatcggctcactgcaacctctgccttccagtttcaagtgattctcttgcctcagcctcctgagaagctgagattacagttgcctaccagcacacctgactactttttgtatttgttagtagagacacggtttcaccgtgttaaacaggctggactcaaactgctgaccttgtgattcacccacctcagcctcccaaagtgctgagattacaggcatgagccaccacacctggtggagtttacagtgagccaagatcacaccactgctttccatcctgggcaataaagcaagactcagtctcaaaaaaaaaaaaaagacggtacagaaaaactttaaaattcttttataaaatataaaaaactatgtaaatttgcatgaatcaatcaatagatacaccatatgaaataatttttataacaataacaaactagaaaatgtagaggcatagtttttgtgttcaattgaagttgttatgagattaaaacatattgttttaactttaagatgtatgtaatctctggttttcaaaatgattacaaagggaatatttgtagaaagtatggaaaagaagataaaaaataatcaaagcatgccagtacaaaattaaatgaaaattaagaaagtaaaacagcaaatgagaaaaatataactactagaaacacataaaacaataacaatataactggtaataacaacttcatttctttaagtaatcattgtaaatataaattaattaaactgcttaataaaatgaaatgtaattggaggactttcaaaggccaaggtaggctgatcacttgatcccaggagttcaagaccagcctggggaacatggcaaaactctgtctctacagaaaaaaagctacctgggtgtgatggcacttactggtaacccagctacttgagaggctaaaatgagaggatcatctgaggtttggaggttcagtcaccagtgaaccatgcaaatcagcctggttgacagagtgagaccctatctcaaaaataactgaggctgggcacagtggcttatgcctgtaatcccagcactttgggaggctgaggcatgcagatcacctgaggtcaggagtttaagagactggccaacatggtggaatcccatctctactaaaaatacaaaaaattagccaggcgtggtggttggtgcctgtaatctcagctactcaggaggctgaggcagtagaatcacttgaacttgggaagtggaggttgcagtgagttgagatcatgccattgcactccagccttggcaacaagagtgaaactttgtctcaaaataaataaatacatacataaataaatatacctaaagaaaaatccatagaatgcctcagtggtttcttaaaaagcatactgtatgctgcccacaaaagactcatcgtagcattgagtcaaataggctgaaagtaacagaaggaaaaaaatgtgtatttcatgaaaattgtaaccacaattgagtgaggtggtcataattatattagacataacatgctttaagtcaagcactaccattaggtgaagactgatattatattatagtaaagtgagttaatttaccaggaatctataactatattcatctatctatatgtatatgtgtatataacatcagggctccaaaatatataaagcaaatattgacaaaactgaagcaagacatacacagcaacgtaatagttgtagacatcaagaccccatttgcaataatagaaaattcagagaaaaaaatgaaaaacaaaacttagacaatattagactatattattttgcatacagaggaatacttcagagattataatttataaagaaaaaaattatgtggctcacactttggcagactgtaaaagaagtgtgtgccagcatctgcttctggtgagggtctcaaaaaacttacaatcatggtagaaggtaaagagtaactggacatattatatggtatgagacagagcaagtgtgaggtaaagaagccaggttcttttaatgaaccagctctcatctgaattaatagagtgtaaactttttggttaccaagaggatgtaccaagccattcatgagaaattttcccccatgacacaaaaatgtcccagcaggtcccacatccaacattgaggatttatcttgcagcatgagttctggagaacatggacatccaaaccatattatagaccaactaggcttcacagacacacacaaaactctccagtcaaaaccaagataatacataatattcccacttgcatctggtgtattctgttatgacatataccaagttttattaaatttaaaagtactgactaggtgcagtggctctcgcctataatcctaacactttgggagaccaaggtaagaggatccactggggccaaaagtttgagactagcctgggcaaaatagtgagatcctaacattacaaataagcaaacaattagccagacatggtagtgcatgtctgcagttctagctactcagaaaactgaggtgaaaggataacttgagcccaggaggctgaggctacagtgagccaaaattatgcctctgcactccagcctcaatgtccataagatcttgtctcaaaacaacaacaaatcaattaaaaaacactaaaattacacactcttgtgttttctaacaaaaactgaatgaaactaggaattaaaagcacaagccaaacaggcaaattcaaaaatatgtgaatataagacacattcttcaacatattcttgctcaggggtcaaaaaactttatttttcaaagatgttaatacaacctacagttaaaagctacagtaacataaacaatgtgatactgacacaaagataaacagatgaaagaacagaatagagagctccggaatgaacccttctgtatatgatcaaatgatcttccaaaaggttgccatgagtacaaaatagagaaaaatcatctcttcaaaaaatggtgttgaaaactgaatatcaacatcgataaaataaagttggattattttcttgaatgatacaaaaatatattttaaataaaatacttagacacaaaaaactaacaaatctttcagaaaaaatacaggaaaaagacatgacattgtcttggcaccattttcttagatatgacattaaatgcatgagcaacaaatacaagaatagaaaccattaactatagtagatgtcaaaatttctgtacatcaaaagaaaattcgagaatgacaacatatttagaaaatgggtgaatatatttgcaaattacatgtgaaaaaagttaatattaaaaatatatcaacaactctaaaaactaaaccataaagttcaataacttgatttataaatgaacaaacaaaactttcatcaaaaaactacacaaatgggaagaaacatttgacaggatgcacaaaattactcatttgcagagaaatgaaaaaaaaacacaatgacagcgaaatcatctcacacccattagaatggccactatatattttttaaaaaatgccaactctgttgatgatgcaataaaaatgaaacccatgttggttgttggtggaaaacaaagatgtagtcattattttaaaatgttattaatgttcctcatttatatatctatatacaaaatatgtaacacaggccaggtgcagtggcttaagcctgtaatcctagcactttgggaggccaaggtgggcaaatcacctgaggtcaggagtttgagaccagcttggccaacataatgtacgctatcttactaaaaatacagaaaattagctgagcgttttggcgggcacctgtaatccgagttactagagaggctgaagcaggagaatttcttgaacccaaaaggcagaggttgcagtgagctgagatcgcaccactgcacttccgtctaggtgacagagcgagactccatctctacaaaaataaatatataaatacataaatcacaggaatgaatgaatgaatgaatgaataaataaatgcaacagaggaccaggaagacatatttgaaaatccatggccaggcttggtggctcatgcctgtaatcccagcactttgggaggccaaggtgggtagatcgcctgaggtcagaagttcgagactagcctggccaacatggtgaaaccctgtctgtactaaaaatacaaaaatgagccggtgtggtggtgggcatgtgtaatcccagctactcaggaggctgaggcaggagaatcacttgaacctgggaggtggaggttgtagtgagccaagattgtgccactgcaccctgggtgacagagaaagactccgtctcaaaaacaaaacaaaacaaaacaaaacaaaacaaaaaagaaaagaaagaaagaaaagaaaatctatgtttattgcatcagtattcacaaaagcccaaaggctgaagcaacccaaatttctcttgatttataaacatatcaaaaaatataacatatacatacaatggaatatcgttccaccttaaaaagaacaatcttgtcacattttaagatgaacattgagaatattatgtcacttgaattaatccagtaagaacattatgggtactgtatgattccactcatatgagataccttaagtagtcaaaatcataaaaacaaagtggaaggtttgtctgtcaaggacgggagagagggtaaaatgagcagatgttacttaatgggtattgagtttaaattttacaagatgtaaggtttctagaagttttttgcataacaatgtcaatatacttaacatccctgaaatgaacagcttttcttttgagacaaggtctcactctgtcactgaagctaaagtgtagtggcacacctttgactcctcctcaacgtcccaagtagcaggtaccacagctgcacaccaccatgcctagctattactaaatttattttatatagaggggtctccatatgttgcccagactgatctcaaacttttgggctccagggatcctcctgtgttggccttccaaaatcctgggaatacagatgggagccacaaccatgcatggccctgaaatatagacttgaatagatttaagatggtaaattttatgttacgtgttcttaaaacaatttttttaaagaaaaactgaaaaatgtccagaattataaatcattttgaaaattaccttcaaatcacaaaaatgtttctctcacaaaagaaaatatatgttcatcattaaacacatggtgaaaataagactgtgtctatggctactcacttaaacaagaaaattttatggtcagttctgcctatatagaaactcacacagttttctgaggaaacgctctctggtactcactaaaagccacactcatccacatcctgatataaggccgagcgtatgcagacctgactgcaaaaacatgctgtagtgcctgccctactgagcaaagtcctgaaggatatgcagtctgtccaaaaataaaatgggaattacaactacccaagtccctgtatcaagccaactaaaggggaaccctagtgcagacccagcagccttgtgaccaagctacaacccctcttcactacaaattcagagggtgtctcatcaccctaagggcccaacaaaagatcattaccttctaaaataagtttatgaaaacatgaagtgtttgctccatcaaattcagacaccaatacaaaactatattgtgcccattgtcaatatttctattttaatgtagcactggaagcatgtggcagaattagtcaaagaaataaaaaaatccattaaaattaaagaaaaataagtaaaaattggtgtttgtaaatcatacaatcttatatttaaaaaaccataaacagcacattaaaacctgtctaaactgataaatacactcagtaaattagcaaaatataagattaacatacaagtatatgtatggtctcatacatttaaaacaaactgataaaatagagaaagacaaaaaccttatttactatagcattaaataatatacttcttagaaaaaaaataaacaaggaggtaaaaaatctttacaataaaaaaaaaagaaaaaattagagaagatccaaataaatttaaaaattggcatattatccaaagtgatctatagattcaataaactttctatcaaaattgcagtggtatttttttcatagtagtggaaaatacgattctaaaagttacatgaaactaagataactttgatagccaaagcaatcttgaggaaaaagaacaaagcagaaagataccatacttataatttcaaactgtatttcaagactacatagtaataaaaacagaatgtattgtgcagaaaaatgaacaaaaaatgcaatacaaactattactcttatacatttcagatctgatgcaaaaagagaacttaaaaaatagttttagtttctcaaaatcatgcagatatttttgtgtccccaaaacaatggaaaagcagccagattgagcagactcatatgtcataaagaggactttggttctcactgtgaacttgaaagaagctcaacaaaagaattcttagagaatttaaaagcatgatacagaagatgtcccttggtgagaacaaaattaaaaaccaaccagccaaccaaacaaacaaacaaaaaacagctgcccaggaactatttcctttagaacacagcttcccaggtcacattttaaggactggccttctcttggatgttgcgacctctcatttgtgtcatctgttgtattcattttcacttgcacctacctgggggtttggcaatcatctcatgtctcttcacggtcagaggtttttttccttgctccagacaggtgatcagttctggcttggagagaacaatacctgttttattaaaaataaatagcatgaatcttgcttatattgtttaattacaagctagtagtgtgctcagcagagaagatgaaataaaatattctagtaaattaatgccaaaatactaatttataacaaatttctaaatattaagaaataatttcaacttgtaggtttcttttgttttgctcttgttgcccaagctagagtacaatcactcaatctcggctcaccgaaacttcagcctcccaggttcaagcaattctgctgcctcagcctctggagtagctgggattacaggcctgagccaccatgcctggttaattttgtattttcagtagagatggagtttcttcacgttggtcaggctggtctggaactccggacctctggtgatctgcctgcctcagcctcccaaagtgctggcacctggccaccacactgggccctgcttataggttttttaaattttactacttggtactactgaatcaaaaatggcttgtgtcaatgagattttcaggtgggggcaacaatattttatgcaactaaatttctggaattaccactaatttagagtgaagaatagagctcaagtcaggaatgcagaagtttggattaaggtgaaacatcttgcagaaattcttttctacatgaacaaattctgaagattttctggaaaaaggccatctgaaactcttatgcaaagaataaattatttaaaaacattccactaaaaaagaaataaaacttttagggttttttgtgaattatgtatttaagttgtcctcaccaaggaagaccaggtgtctgtagttctctaacatcacatccctatataaattccgctgtgcagtgtccaggcaatgccactcctccagagagaattctatggccacatctgtaaattgcaatggcccctgaaacacacacacacacacacacacacacatttttaccaagtcgccatgggtggaatttttgacttaagatgaaatgagcgagtaaagagaactgattctgacttataggactaaaattatccagtaaaacaattttcaacacagaaatattccctattatattctctgactctgagaagagcagcataagatctacaacattatttcatgtatgatatttttctaaataataaagtataaaattaacagcatgaacatgaacatgtacatttttgagtgctatatttacatcacatggaattatgaatatttttcagatggaaaagacatgttgagttagaaggcacctctcaaaattttttttttttttttgagacggagtctcgctctgtcgcccaggctggagtgcagtggcatgaactcggttcactgcaagctccgcctcctgggttcaagccattctcctgcctcagcctccagagtagctgggactacaggcgcccgccatcatgcctggctaattttttctgtattttttagtagagacggggtttcaccgtgttagccagggtggtctcaatctcctgacctcatgatccacccgcctcggcctcccaaagtgctgggattacaggcgtgagccaccgcgcctggcctcaaattttaatatgtacaataagctgaagaccttatgcaggtttttttttttttccagaagatctggcataaagtctgattttttgaatttctaacaagctcaccaataatgtcaatgtttttgtcccaaaaaggatattttgtcaaacatgcagtaagtggaagagcatgtgtttttcccagttttcctggcctgtaaacaaagagccttcattttccaaagaaaagtatgtagaaaaaaaaaaagctgccagatttaatgtgatggtttatccacatcagctgcataaagataattaataatggggccgggcacagtagctcatccctgtaatcccagcactttgggaagccgaggcaggcagatcatgaggtgaggagatcaagacaatgctggccaacacggtgaaatcttgtctctactaaaaatacaaaaaattagccgggcatggtggggggcgcctgtaatcccagctactcgggaggctgaggcaggagaatggtgtgaacccaggaggcggagcttgcgttagctgagattgcaccactgcactccagcctgggtgacagagcgagactctgtctcaaaaataaaaaaaaaagataattaataatgaagagaaaaataattaactctacagtgaaaacaatctgtcagagagctatttcaccaagtgaattataaaccattaactgcacaaggacaaattttcatgatgcgctaatgcacacagaagaacacaacatcactgttgaaatattcctcccaaggaagtaaataaaatctgaatttaataataaagaaacatgtttatgctaatttcaaagtacagaaaactcctatgttctgtaatgttcagtagtaattttaaggagacttcatttagcacccaagagatcaggtatctcctaataatttttttcagaactttctgagtaataaatgccattccatataaataagtattgtcttaatcctgttctgcataaattaatgaaacacacagatggagcctcaacattacacgttctccatctttactaaggacaaaagttttccccaatagaaatcttgagtagccgcatctttccatgttcaacagccacaaagggaacatttttaatattgcagatcataacttattgctgagaatcctgcatggcatataagaagctatgacacagagaatgcagagaaagctctgggatatagaagaaaaattattttttcagagacccttgactatcgtaagaattttaagtagttaaaccaaacccagggagaaaaaacacaagtagagaagtaaaggtttgtgagtgctacatgcatggcagtccaggaggcagagtgaacacagctcttcatctgagacatgtttacctgaagagaagccttttttttttttttcacctcctcctctggaattccttgtcagatgagattctctggccaaattacccctgcatcttgagactatgcctttaaatgtgtcagcaccacatgtttacctgctagcatgacatcaactggcagaaaaagacagaaaaagtccacccatttctgttttttacaacaaaaagattcaagaacaatgagatgctccatgaagataaaaatataagtttctcctttcatgtcctctggtgccctttctgccacagacaccagcaatttctgctacagtaatggaaatatgtgccacactgacctgcccctaccaaaaccaaacagaacaggtcctgtgcgcaccacttagtgcaaaggtggaacttcttaactctcatgaaagtattttgagaccctcatacctgattctggcctccccttagagtcacgtgaagcccttcattaaaacaacatggatacttccacccagaacaataaacagaaccggtggggaaggcacaagagatttctgcaaattggccatgtgatcctaatgagaagcctgggctgataaccactaagctaagcattgcctctcaagctttaagaagcttataaatcacttggtaattttgactccactttatgtgattctgtaggtttgaaaagggtccataaatgggtgttttaaacaagtcccctgtcaatgctgatgttgcttctccttggctcattattagcattagagaaagcaggaatagcagagggtcccttacacttagaactcttgtcacaaccaaatacttctggtacaaataaggacaacacatctatgctaaagttttatattctttgctgggtctttaaagtttacagaggaaacagaaggcagcaatgtctggataagtctgcatttaaaaaacatgtacacatgtacaaatgcaatgtttattaagcaggtactttgtgctcaagagtatgatacagagcactatgctgggcataacatattatgtgatttaattcttgtaacattcttggagctagtactcagggtttaataatttccaggatttagataaagggcagagaatttttactgcctcttctgtttctctgttaccaaatttttttaaacattgtaaagaataaaagctaaatatatacagatgaaagagatatagaagagtttattgtagtttagagaaaattttattctgtttatgtttacttttctgtgacttgtggagcaactactggatctgcaggaatagaaaacaagttgctaaatagaatgtctctgccaacactggttttaacagaaaatttaaaaactaagactctacaatacatactttatttttcccatttatctgcttttgggtttcaggaaattggattcaccagccaaaactctgatatcttctaatcagttctgtgaggcaagactccagagtagggtcagacctaaataaggcctccaaaaagggtgaatctgaacatgtctgggacaaggtgaggatcctatagaattctgttctctatgccactgtggtactaacagttttctttttttctaatcttacctaaaagaaaaaccccagagtttctgtaattttaatattttctagcactgctctgtcaactttatactgtatactaatatgcaatttaaacaattctcttaaggttttctagggtaattttataagaaaatcagtgtgtacacttacgaaggtaaaagaacagaaattatacggctgggcacagtggcttacacctataataccaacactttgggaggctgaggtagatggatcatgaagtcaggagttcatgaccagcctgactaagatggtgaaacctcttctctactaaaaatacaaaaattagttggctgtggtgggaggcactgtaatcatagctatttgagaggctgaggcaggagaatcgcttagacccaggtgacagaggttgcagtgagccaagatcatgacacagcattccaggctgggtgacagactaagactccatctcaaaaaaagaaaaattaattataacaattctactgttcattaatatcccttcaggtggtaggtaccatgactgcttcatgtatttttttttaatgaccataagaaatggaagcaactagtttatctacttgggtctccagatctccttgtttatcatccaagtaccaggaaactggagaaactctcatccctgtacaaaccaaagacaactcttgtatgatgggttgaacaaacacagaatgactcatttttctttacactgagacagaagcagaattaaccactcttgtcagcctgacacaattctactctggacatcctcaaatgcctcaaagaaacctaggtgattgtgagggaattcccagtgacccagggctgatggcccaatgataagccaggctggagcgactcaggctgattctaaatagaaaataaaactgcgttggtggagccccagaacctgggtcacctgtcctgatatgctagcacttgggtaaaagacagaacaaaaatactctactccagtatcccattttacaggtaaacatagttgtggtcatggctctggatactttgtggcctgatctctcactcctaagatgattatttacacttacagattctgccatcagattctatttcctcctggagcctctcacatcactgtagcaggtcaatgaaaaagatgtaaaaaaactcaaaatgccacactctgaaatgggggctgtaagatgtctatcttgacaacttacaatgcagaaaataacttttgttaattttctgtacattccatatccaaagtctggcactttttaaatcccaggcagaggccggacctaatctgtagattctagataggatcaacctggctctgcatcctttggtgttacagcaaatggagtacaatcaaaggagagtaccctcatagaggctgctctagaacattctaagtgataagtctaaataaaaaaagctgacatatcaagaatataagtagacagtttatttggtttaagcttaaggattataaccagggagcaaagattcaagttgcctgaaatctacactttgattagcagcagttacaagatttgtaaagacaagagagggacatagagtggtctgatacaaagttgtttgtcagaagtttttatttatttagataaataatattgattattgattagatatatatcattattgtttagggtatagaatatagtatccaatgtggcattgttaatttactttatagctacttgtggcaatagtgaacagtttcaagggatgaatacatagttcaaaggggagagaaagatgttaactgctctttcattttaacatctctctgagtttgataaccaaaagtgcttgcactttttagataaaagttttttatttcccaaatctcaagatctggattcaaaatatggagctacagatttaggtcctgaatggcaggagtagcagcaggtgttacttgcacattagtgagcatttcagcaagagtagaaaggggatagtggagactttcttgtctacatgtctactcaattcacatgttactccagttcagtttgttggccccacggtctctgaatctgtttaaggtctgaaaatacaagagtcattgaaagagaaaaaattattgattgcttccctgtgaaatttgtagaaatctgatctagtctctctagcagtgactgtaaaggactctagataccaaataggcagggacacaattctgccttcatatttaggggacagcatgcactttgctgcacaagtgtgagttgactggaagcctgagaggaatagtcccctctagagtaagttccggttggcaccttatttgtgtttatatcatgtctggtaattctagacagtgtttggaaacaataattaaaagacagattttatccagctccagagaaactccacaataatagaacagaaagaaaatggttttattacacaattgaacttgaatgtgacatgcatcatggtcagtctgcttaagagactgcaaagatagaaagatggtcaccaatattagtccccaagcagaagaatttccagcaccatgtcatacatagttcatcctaaattcacctggagattgaagaggccatctgtgtatactaattgcttatattcaatgacaaataaacttttcacatcttcataacaggaggtagtttagcagcttgaagccaggtgcctgctgaaggtagcctcttactctgctacaaaaatggttgaatagggttcttttttgctatttacattttagagctgtggttctgtactccctgccactgggctacagcactcctgcttgctttctcctggttgctagtatgctctcttgacctctaccatgtgccactgaggcacagcccagagcacagctcacattttatgtgaatcccatttgccacagcagcactttagtgtcacatcagatagtgaagcctgagctgcaggaggagagcctgcaggcctcctgggtagaattacacattcacaataatggaaatgagagcagtgtttcaacctcagtttctacttataatggtgacaaggaaaaaatactgctgaattttcagcatgactcaagatagagatagctccaaaagttctcactatgacagcccacctcattcagaaaaaaatgggatattaatagggtttctgaaacagacacctaaagctttggagagacaaacagatctccgtctgagcaagattgagagaaaaaagctaaaactatcttaagaaaaagctcagattagatgtaagattgatgatgtcagccagaaaatattcccctgaaagcaatttctctctaaacacccaaagtgcacagctactctctgcatgagaaacattagcattatgaagaaaggggcaaagtctcagaagaattttatagtttcttttctatctctgctgatccatcatctcctagtcattgaataggggttctgtattgaaatacatctgacaacttcccacaacaccttctgatgaagaaatagaatctgactgtgttcatttattggaatatattagaacttgcaacatagctaactgaagagctactatggtttttggtggccacatcacctgtctttatttgtcatgtaatagcagcataccaatttagtgaaataaaagatattaaaattttgtttactcataattatccctattgaataaagtaataaacatgtcacactaatatctacttactgtgacaatttggtaataaattttctttagatattagatataaatatcagtatgaataattttaataaactagtaataatatatgtagttttaaaaattgcaactatacttcagttaaaacactttatatttcaaaagtataaattacaatattaaaataaccatgtaagtgattcattcaaagtaagtattgcggctttatattcatgttactgtagaaaatactgtttatggctcatgccttgtccacacttcgggaggctgaaatgggtgggtcacctgggtcaaaagttcaagatcaaactggagaacatggtgacacccatctctactataaatacaaaaacttagtcaggaatggtgatgcacacctgtaatcccagctactcaagaggctgaggcagaagaatcgcttgaacccgggaggcagcggttgcagtgagccgagatcatgccattgcaccccagcctcagcaacagagtgagactctgtctcaaaagaaaaaaaaaaagagaatactgttaaatgtatataaatgcaggttgtctacaaacattacgtataactatgctaattattctgaagtaataaatagaaagcaaggtacaactactgactccactgttaagtttatacactagactgttcttgtttttgcagtgcaagtacttcagcctgcaaatattggataatttccttagatcatcaggtttctgtcaaagaaacgtagtatcttttattgtttaccattctgtgttactaaatttaatcctatctttgtgctaagcttttttgtgctctaaaattagcttttacctaaacaaatctgtgtctattttaaaggactaaaaatgaaaaaaataaagttttcagaaccaaaaacaaaccaataaatctgaagtaccagataacgataatctggagtcagaaaaatgacaaaaggggatgggcatggtggctcacgcctgtaatcccagcactttgggaggcagaggtgggcggatcacaaggtcaggaggtcaagaccatcctggctaacatggtgaaaccccgtctttactaaaaatacaaattagccaggtgtggcagcatgcgcctgtagtcccagctacttgggacgctgaggcaagagaagggcatgaacctgggaggcagatgttgcagtgagccgagattgccccactgcattccagcctgggtgacagagcgagactctgtcttaaaaaaaaaaaagaaaatgaaaaagaaaaaatgacaaaagacattatttagctgttaatatgatttacatacatttcaaaaaagcagagaaaattgtctatatataatctaaatcccttaagcaaagagggaatagcaaaatatttttttggaacttattgaagagttttgaactcttggacatctgaaatttgcacactctatgcacttgacagaatgtttatgaaggaaaaaccagaaaagagaaagatgttataaaaaaatccatgagtgcacaagaccaatgcaacagaatagagagcccagaaataatgccaccctcctacaaccatcagatttttgatgaagctgacaagagaaatgtgggaaggattctctatttaataaacagtgctggaataactacctaacattatgtagacgactgaagctagacctcttcattataccgtatacaaaaatcaactcaagataaattaaagacttaagtgtaaaacttaaaattatggcggggcgcggtggctcatgcctgtaatcccagcactttgggaggccgaggcgggtggatcacgaggtcaggagatcgagaccatcctggctaaaatggtgaaaccccgtctgtactaaaaatacaaaaaattagccaggcatggtggcgggcgcctgtagtcccagctactcgggaggctgaggcagaatggtgtgaacccgggaggcggagcttgcagtgagccgagattacaccaccgcactccagcctgggcgacagagcgagactccgtctgaaaaaaaaaaaaaaaacagaaaccaaccaaacaaaaaaacccttaaaattatgagaaaccctccaagataacctaggaaataccattctagacatagaaactggcaaagacttcatgaggaagctaccaaaagcaactgcaacagaggcaaaaattgaaaaatgggacctatttttcaattgtgaagatcttaagagcttcttcacagcagaagagattatcaacagagtagacaacctacagaataaaggaaaatatttgcctctgacaaaggtcgactttccagaatttattaagagcttaaacaagtttacaagaaaaaaacaagcaacctcattaaaaagtagacaggacgggcacagtggctcacgcttgtaatcccagcactttgaggggacaaggagggtggatcacttgagaggagttcaagaccaacctggccaacatggtgaaaccccgtctctactaaaaatatcaaaaattagctgggcgtggcggcaggtgcctgtactcccaactactcaggaggctgaggcaggagaatggctcaaacccaggaggtggaggcagaggttgcagccagctgagatcacgtcattgcaatccagcctgggtgacaagagcaaaactgttgcaaaaaaaaaaaaaaaaaaaaaaaaagtaggcaaaggctgggtgcggaggctcacacctgtaatcccagcacttttaaaggctgaggtgtgctaatcacctgaggtcaggagtttaagatcagcctgataaacatggataaatcccgtctctactaaaaatacaaaattagctaggcatggttgtgtgcacctgtaatcccagctacttgggaggctgaggcaggagtattgcttgaacctgagagtcaaaagctgccgtgagccaagatcgcaccattacactccagcctgggcaataagatcaaaactctatctcaaaagacaaaacaaaatgaaacaaataaataaataaataaaactaatgtagaaacagaaaaccaaatgcatgttattatttaagtaagtgctaaataataagaacacatgaacacaaagaggagaacaagagacactgaggcctagttgagggtggagggtgggagaactaagaggatcagaaaacatacctgtttggtactatgggtaggacctcaatgacaaaataatctgcacaccaaacccccatgacataattttagctgtataaaaaacccacacatgtacaccgaatcacaaataaaacctaaaagaaaaaaatactccaaggtgggggagagtgcaatgtaggtgcatggactgcttttcactatagatagtagcccaggtggggctgtactctgatttatttctgtgtgaatgcaggtagatgaaattacaaacaggtggcccagaccctaggctggtggagaaaacaggttgctgctgcaaatttagtatctaggggtggggatatgccaggagacttgtagagatttttgggttcttggcaagaaacactaggatcaaaaatgccatggtgaagttcttgagggtggtgccgagtcctgggagaagtgtggatacctcaatttctagtgtgtgtgtttgtgagtgggtgggaatcctgtagtagcagctgcaagaaaaggggtctgtcataagagcttcttctgagttttcagtcctctgtcaccctgggagaagacctggaatcacaggacaatgggcaatgtgacagcctgtgtacaggagagcagagcctcccatttctaaacacccagagctttgttccagtccaggcctctgtgatatcttttttctggcaccaaatctgtagagtttgctgagcatcaaacaattctccaacaactaattgtctaacatttaaattctgacaccacccagagtcagcacagaccctgattcagggctcagttccacaacattgtcctcactgcagatgccagtcacaaaccccatgggcccatctacgcttctgagctactgtttgaaaactggggactcccaaaacctccctgaagttcaatgatttggtagagctactcacagaactcatcaaaacactgtagttatgtttaccggtttaatatataagatgcagcccaggaaaagccaaatggaagaaatgcatagaacaaagaaaagagatggggaaagatgaaacacatagataatcatgaaaaatgtttgtgattaataaaattctccagccgggcacggtggctcacacctgtaatctcagcactttgggaggccgaggagggtggatcacgagatcagagatcgagaccatcctggctaacagggtgaaaccccatccctactaaaaatacaaaaaattagccgggagtggtggcaggcgcctgtagtcccagctactcaggaggctgaggcaggagaatggcatgaacccgggaggcagagcttgcagtgactggagattgcaccactgcactccagcccgggtgagagatcgagactccgtctaaataaataaataaataaaaaataaattgtccatcctttgtgtactccaggaacagtttatggaaacacccttcaccttatgacttcaatggtgctcttttttcttacctatcacacaggcaaacacactctctgcacattttctcctatttctcattataaaaatcagctgattttttcttcagtggtcaattttttttttttttggtgtgatcgagtcttgctctgctgcccaggctggagtgcagtggcgccatctccattcagtgaaaccttcgcctcccaggttcaagaaattctcctgcctcagccttcccagtatctggcactacaggcgcccgccacaacgctcagctaatttttgtatttttagtagacacagggtttcaccatgttgggaaggctggtcttgaactcctgacctcaggtaatccgcctgccccggcctcccaaactgctgggattacaagcgtgagtcaccacccctggcctaaaataaagtaattcttaatgaaatttacttaagtttatctccctccgtcaggctcctgaactttgagctaccctcggtctgagtcgacatacaaccccatttacgtccctcctaagaacatgctgatttcagggtaagacattctgtgatctaaaatctgaccttttcaccctccatttgccattcccttcccacctcctttctaatcttgtttaatcctccttaggaaagaaagtccttttgtgcctacagttttgcaagccacaaagaccttatagtaagttgatactttctcctattgcaatacttttttggaattcattgttttacataaatctaacgttgttatcttacaaagtctaaaacttgcctcaaaacaaaaacttcattatcagtaagaccctcccagtttcctttcatcttaatcttaactgcatctgcctgtggggctccagctttccagggctctgtagcttctctcaggataaaggctctttccatagctggggtgagcaggctgggacatctgcagggaagtctccccagcaaaaaaagaactgggcctttaataacctcctgttggccgagtgcgctggctaaagcctgtaatcccagcaatttgcgatgccgaggcgggcgaaaaacctgaggttgggagttggagtccagcctgaaaaacatggagaaacctcctctctactaccacacaaaattagccgggtgtgatggcgcaggcctgtaatcccagttactcgagagcctgtggtaggagaatcccttgaacccgaggtagaggttgcggcgagccgagatcgagccattgcactgcaccctgggcaacaagagctaaactccatctcaaaatttaaaaaaaacaaaaaacaaaataaaaacacctcctttttgcagccttaatattagccttagcttggaattactaggttcaagcttcagtttccatgtcagtgttattcacctggtttttgaaactaagtgtttgaaaaatccagtgaaattactcaaacatagtgtttacataaacggagattttaagatactttttaaaattttattaaacaggagtctcgctctctcatgcaggctaatgtgcaatgacgcgatctcagcttactgcaacttccgcctcccggtttacataaaggaaggaaattttaagatccttacttttttttttttgcgatggagtctcgctctgtcgcgcatattggaatgcgacggcgcgatctcggctcacggcaacctccggctcccgggttcaagcaattctcgtgcctcagcctcccaaggagctgggattacaggcatttgccaccacgcctaattttcgtatttttagtagagacggtgtttcgccatgttagccaggctggtctagaactcctgaccacgtgattcgcccgccttgctctttgaaagtgttgggattacgggcgtgagccaccgcgcccgaccaggaagtggttttttaaccctaaggcagttttgtttttgtgttcttcccctattgcctggggtcagaccagatcatctaaactgatcccgactggcttagaccccaactttttccaaataggataaacggagatttgcagggaaagaagagggaagaaggcgtagtattgatttacaatttttacaatttatgacctggaagttgagtctttcaagaggaacttagttgtcctaacaaccctttacctcaagggatccgcccgcctcagcctcccaaaatgtgggattacaggcgtaagccaccgcgcctggccccataaatttttaatacgagaaaagagaaactgtgaaccccacggaccaaagctcttcccattcgggaacccgcaccccgagtcaagattctcccctaaagaccctctcgtggttcctgcacaatctgggagatacccggagctgtgggtgcagagctgcccagagagggctccaggccggggcacactcgctgccaagggaagagtcaggacgcccgggaccggcttatagagcacccgccatcttttttttttttttgagacggagtctcgctctgtctcccaggctggagtgcagtggcgcgatctcggctcactgcaagctccgcctcccgggatcacgcaattctgcctcagcctccctagtagctgggactacaggcgcccgccatcatgcctagctaatttttttgcatttttagtagagacggggtttcaccgtgttagccaggatggtctcgatctcctgacctcgtgatccgcccgcctcggcctcccaacgttctgggactacaggcatgagccaccgcgcccggcggagcagcttccatcttatggatggtggggactaacgccaagctgggcaaggagaactcagggcacagattgtggagctgactgcggggagccctgagtcccgccactgccacttcccatcaaccagtccctcccctctctggggatgttggaccggtactcttaccatttctagacttctagggggtcctggctcttggctgtggatctcccaatacctgcaggtcaaagggcctcagaggctgggcctctatgagcagagaacacagagcagtgaacaagagatctggagctccagcggcagcaagagacaaaggccgcgccataccagaaagccgtcctcttcgctccagctgcctgcctgattggagggtttccagaccagcctccctgattggattatgcttaaggctctgccccctcagtacctgagtgacagaagatgtaatcagattctgggctgagtgaaggagtaacagcctaagatgcagcctttccagacagggcttcctccctgagctgagccaggctcaccccagagaagggaacaattctgtatcttttttactctctctgtttttgaatgtattcaaaaggtgagcaggagtatttttctgtcatatgaataatacataatatttttgttcaagagaaaatcaacttttactttggtaatagtgtattatcaatactaaagctaattttaataaaaccttataaataaatcaaatttgccacttttaacctctcgagatttacacatatattttgtaatctcttgtaatttttttaactttttatattttatttttatctacattctattttttcaatttgaaacaacctttaagtaatttcaaattgttgtaggagatagaaagaaatcatttaaggccaggcacagtggctcatgcctgtaatcccagcactttgggaggccaaggtgggcagatcactttaggtcaggagttcaagaccagcctggccaacatggtgaaacctaatttctactaaaaatacaaaaaattagctgggcatgctggtgcacacctgtagttgtagctattccggaggctgaggcaggagaatcacttgaatccaggaggcggaggttgtgtaatggcccaaggggtacaccttgccctttggtttagacagagctgatttatcaagacgggccttttgcctagacagagcctattaattaagacaggagaatttgtggaggaaaagttaaatattaaatttgaactcaattgaatgtggacacagacaatggtcactaagtcccagaataggttgtgtgagccccttgaggcatttatccagtgctgtattggagaaatctgtaattcaatctattcccatacatttattattgaaaaacaataggcaatcacaaaaacaaattggcctttttgtgttccttgggcctagtcttgaaaggctgtcataactgggccttatgccaaacaacttgctacaaaaagagctagggtcccagtgtagcaggacaagccacagacaaaacctctcagacatcgagttgtagaaggaagggctttattcagctaggagcatcagcaagctgctgttttaaaatccaagctctctgaatgcacaatttctgtcctttttaaaggctcacaacactaaagatttcacatgaaagggtcgtgattgatttgagcaatcaagggttacatgacaggggctgcatgcaccggtggtcagagagaaacagaacagggcagggagtttcacaatgttcttctatacaatgtctggaatctacgaataaaatcagtttttaagttatgagttgattttttattattaggtttaggccaggcaggcccagggctgcctgtctttaacttcacttccttgtttttttcttaaaacaggtactgagtataaaacaataaaacaatatgagtgggtctctctcttccctcatttcctctctttgagactctcacttttttattagtgggagttctcactcttatttttgctacttatgtctttttgtgcaatagattgatagtgatttatacagtatgcttgtgctgaagtattttggtgaactaaggtagcgacgaagttttttatcatttggagaaatacaggtatcagacaagggagcagtaagcaggttcctgttactattattactcttattataagagttttaaatcttcctatttctggaattaatttctaaacatggctcttggattgagtctgtgccacacttgcacgggtacatgtgctagttttgttatatctttaactatatcttcaactacttgcccctgatcatctgtgtgtagacaacaattagtaaggttaaattttctacaaacttctccttcagctgctagcaagtagtcaagagctagtctattttgatagacagcatttctcatcagagtccctcatggggcaagaacagtcaaggcttgaccagttttattagtaataatttttaaaaacagcttgtaaccctatgatttggttgagcctgtagatgggggctcgatatccttatgagccatcttgtgcctaagtggcaggtctatagtattgtatgattttttcagggggccattcattatctttctaatcacctatggctatgcttcatttttcatgggaagcatagactgggaagcctagaaattcacctgtttttatggacagcaagaagaaatggacagcttaatggtgccaattacacagctacctgtctactgatcaggtagcttagcataagctctgtgtctatagatccagtataacctggtgggggctgtccagtcccgtggaattctgggtggacttaacaggctgcaactttggaaatttactgaatggatttctttctgtgtaattggaacttcaccatgtaactgtttttgtggtattattacacagcttttgtcctaggcaactaagtcaacttacagaatgagtgaattttgttctttttctggatatgcaatattgtccaataattgagacttttagaacctagaaatgatcagggtgattcttttgggccaggaattcatcaggaactgggtccgtaggcactaattcttgggcttcttatggccattgatcttttattacagtttatttacaaacataacatgaagtgatatttagagattgggctacatgctcggctaattgcaaaaacaaatttttagtttttcctggaatctcaggtactggcacatttagttcatcatagaaagtctgaaatactggttctgaagagtgtttttgaacctccttttattagcatgcttatactaggatctagtccttttccatcaatgcctaatgttacattatattttttgttctactttgggtctgaggggtttgtgattatcgattttaaaaggttgcagctcctacttgtgcaggaggggctgacttttcctttttggagctaaacaggatcttttttatctttttttcaagtagcctaaatgacacaagactagtattgacacatcttagataaatatgattcttgacagatatatacatttttttttactgtgtaacttttttttctaatttagagaactgcatcttattccatgctgcttactatcaatagcgcacaagcaccaaattttaaggttacatttttggggacccctctttcttctgttctagctattactttacttgtgtcacttagaaaaggaccagtcctaaattttattttaaaaatgctgatcatgggaagcttaaaatgggtcataacatgcatcaggttatttcttgggctacataccttggatagaatagcattatacaaacaagtttcttttagagtcctggtacacctacaataactataaaataataggactgtagcaatcttttgtcttacttcagtgacttgatgtatatactggaaacagttctcagtctgaggaaggtcagttgaagtctttactgtacaagtccaaattttaaggaaaatgagtgctgcaatgagtttcttcatgctttggctatgtgtggaccagtcagcttctgggtgtgactggagcagggtttgtggtcttcttcagagtcactttgcaggggttggcgaagctgctcctatctatgtacagctcctagtctactgatttttaagggtagtctcggaggttgggcccactagaataaaatgagcctaatacttctacacagtttatgtttaactgggctctctgatactaggagtaaggtggcggggttagggtgttgcaatcttcaatggttgtgtggggattttcacagagcaagctttggtatctagttagtctagcattcattagctaatggtgtcctttggtatttattaaaatcaccacagcatggggggactttatgtttaggttttgtctaagagttagcttatctgcttcttgtggtaacagggccattgctactagggcctttggacatgggggctagcctttggaaacccaaactagttgttttgagagattggccactggccttggccagggcctcacagtctgagttaaaactctaactgccattttttttttctttctgacacatagagtgtaaacagttttgtcaggtcaggtagcctcagggctgtggctgacaagagttttttttttttaacttgtgaaaagctcattgctgttggttgtaatagatgtagtttatctaatctacatttttattgactgtcatctcctaaaatattgacttaaatcctgtaactatttgatttcaggctttaaattgatctggtattccttgcggggctctaattgcatctaaatagatgtgagagttgaaagacctataagggcttctcctgctttatgatgtcctattatttatttatttatttatttatttcctctggttgatgaaatgccagtgtgaaagggatagccaaatggactaaaacacaaatgccactctagttattcggcagagtgcccagtaaaggtctaccacaataccaccacacatccgctcaaggatgaagaagggctgactgattgataagctcttgaaaattcttaagctcactgtatcctttcaggtctctaaggaatgctaagtcttagtgttcctaagtgttaggaagtgaacttagtgttgggagatggaagctggatggccttcggggactgacctgcagggacttcagaatatagcagagagaacttggcatgacttattactctagactgtagaatcctggaaaagagctatcatgcagcctatgcctggtcaactggaggaccacattagtggaagggggacaatcagggcctctggcctgccatgtgcacaagcataacaattgcttttgtttaaggtgcagatggaatatgtgatctattttaaccaggaatttgcatcttggtatgctgtcttaattgccaaagtttgttttaactctttaacttttatgatcctctagtaaaatgaacgtctcctttagcaccaatttttattagtttttagactaaagaaagctaaacaccactttatatttaataatgtttcttgtatgatttttataccagataagctaaattttacctttatattagtgtgttattaatattaatcttaattttaacataaccttgtagacatatttatcaaatttttcatgtttgaccataagttaagattttatagactatttttaaccttttataatttttgttaaagagcaggtgatgctttaagaaaaacctgttgcatttttactttaatgtccagttcacagaaaaactggatgatactgttttaactttagctaatgtgttcacacacagaattttctttataattaacattttaaaacttgcttaaacttttaaaacaataatttttttaaccttttaatgttggtaaaaatctacattcttatgcccttttataatctttttactaaaggtatattttacttttcttatacactttgcacataaacttttttttaaatagtacttaggaggctttattacttttaaattatataacatttttgaataaatttttttataacactttttctttcacaactttcaccaacaattcttcaacatgtctcaactttttgacttattacaaacatttattttttctttaaacaactagttaatttatttcaggacaagaatttaccatataacactctttttacataaattctacctcccccccccctttttttttttttgaagataacaattcctttttttaaagcgaactttctttatgtctttggactagactgtctaaggccacaagattagaagttaccataatacacgttacactgttaacttttagcaaacttcacttttgttgaaaactttgtaagtttgggatttcatttaccctttgctattaataagaccttgtttagtttaaattaacttggaattggtataggtggcctttttttctctctgccggtctttccttgcctctgccagccgcttatgctgctgttctcttaattactgtaggggggaagagggtctaaaaccagctgtaactgtctatgtatggaaactggtctgggtgccttggcttgcagattacattgtgtcatacttttgaaacaagggacctgtccaggcttccttctgatggtcaacccacctctaatgctggccagtctatttcacacaaagttctaagttttcttggtgtcatagtaacactgtaatctctattaaatcttttcttgaaatttttttaacatagttcctaatggggtgggcttacttatgcctgacctatgcttctttgagacaaaacactatgcttacaccacacacacaccacaaaacaaaacaaaaaaaaaaacaggtaaaaagggcacacacacacttttgcagtttacaccaaactaaaatcaaaaccaaaatcagagtatccagaaatctaagccaggtcaaaaccaaaactaaagtatcatgcagtctaagtcaggtcaaaaccagaacaaaagtgccaatgcaggcacactgtgggtgatcaggccactcttccattcagatggggtggggcaagttccaaagactaatcttaccaagtcaagccaagtcaaaaccagaacaaaagtgccaatacaggcacactgtgggtaatcaggccacacttccactcagatggagtggggcaagttccaaagactagtcttaccaagttacagatgtccagactccaaatgccagttccttctgggtgttcagccactgtgttaatcctctgtggggacctgctactcgctgctctggtgaggtgttccgccagggcaatttcctacctgggagcactctttggatcatgtaactcaggctggctggagtcccccgcagagatgctccacagggcaggcttaagccacctgaggggctgcctcagctgcccatcagttacctcatttcccagtcagagaaccaagaaatgtagcaggacaatccgcagaaaaaaacctctcagacactgagttgtagaaggaagggctttattcagctgggagcatcagcaagctactgctttaaaatccgagctctccaaatgcacgatttctgtcctttttaaaggctcacaacgctaaagatttcacatgaaagggtcagattgatttgaacaagcaaggggtatgtgacaggggctgcatgcaccagtggtcagggaggaacagaacagggcggggagtttcacagtgttcttctatacaatgtctggaatctatgaataacattgatttttaagttatgagttgatttttaactactaggtttaggccaggcaggcccagggctggttttgggcctggcgccaggctgcctgtctttgatttcacttccttgtttttttcttaaaacaggtactgagtataaaacaataaaacaatatgagagggtctctctcttccctcaccagagggggccaaagttttatgagacatctcctcatctgtgcacagatgggtggcggactctggagtccaggctgttgcttcccattctagtggtgaatcttccatagtctggtgagtgtaaatatatatacatctctttttccttctcctattcccattgcaatttgcttttatcaatctgcttattacattgatttgcttattatatctgaattgccatttatgtgggataaagtttgtttacccttaaaggtattgtgtgtgtgtcttttcttctccccttctgtgtttcccacacagaacatttttgtcattacaaacagaaatcaaaaacaaaagtgtgctgcttcttggccagaaggacagggctgatggctacgggacttcccataacctgggatgagaactcccgcagttctccccctttgtgatcgaatggtccaggggaactgacctttgtgagaactgggaatcttaattagtgcaatttaaacctttgcctgtgcatgaagtgctgcaggagattccagtcagcaaaggagctgctgagttgatctcccggagtggatggtgtttgcttactgcttataagttaatgtatcaagacaggggatggttgctacaagagaaatgtaagctggaaaagaaaaatgctagtctgacttccagactggccctggcccaatgccaggcctatgtcttgactgatcaggctcaaagatatccacctattgatgaaaaaagcagctgtccaaatggccccatcatggtaaaactgaagaactagttagctaggcttggagcaggtaaaaacccagctactggccaggcacagtggctcatgcctgtaatcctagcacttttggaggctgaggtgggtggatcatgaggtcaggagattgagacaatcctggcaaacacggtgaaacccagtctctactaaaaaatacaaaaaattagccaggcgtggtggtggctgcctgtagtcccagcaacttgggaggctgagacaggagaatggcgtgaaccagggaggcagagcttgcagtgagcagagattgcaccactgcactccagcctgggtgacagagtgagactccgtctcaaaacaaacaaacaaacaaacaaaataagcaaaacccagctcctgtctcaaggatgggaaattaaccttagtaaaattcaaggacctgcacaaagtgtacaattccttgacatcttatggaatgcagagaaatagcccattttaccaaaggctaaggctaaaataccagaatttgcaacccctagcaccaaaaaggaggaccagaaatttattggtttgtttggattctggaaacatgatattccccacttgggtaacattttacaacctctgcatgtagtcactaaaaaacactatgactttcactggggagagaaagagagcatggcttttaacaagctaaacaagtggtgcaactggccctggatctgtggcccatatgggatgggccagtagaactgcaagtaactgtcccagatcaacctgctaatttgagccttaggcagaaacctttcgggtttgggacccagaaactgccagaggctggcaaagcttatacccctttgtagaagaaattgttagcttgtgattgggctttgctgaaaagagaacaccactgcttcaaccttgatgtctttatgaggcctgaaattcctatcatggcttggtgtcatgaattccccaaaacccaccagataggacatgcccaaggaagtagcatcataaaatggaaatggtacatacaagaccaggctaagccaaaaccaaaggggttatcacttttacatgaggatgtacgaaacttgtccgctcaaaaaaccaccaaactatcctgcagataggaaagaaaccccccccacaatccacccaaaggggccaatcttttaaataactaagcccaaatgatcagaaacatgcttaatttatggatggatccacaaaatacattggtgggacccaatgctggaaggctgtggcttctgttaatcctgttaaaacataagcattactggccagatgcagtggctcatgcctgtaatcccagcactttggtaggctgagttgggcagatcacgaagtcaggggttcgaggccagcctggtcaacatggtgaaaccccatttctactaaaaattacagaaattagccagggtggtggtgtgcacctgtaatcccagctactcgggggagtgaggcaggaaaatcactggaatcccaggaatcagaggttgcaatgaaccaaaatcacaccactgtactccagcctgtgcaacagactgagactcaatctcaaaaagaaaaaaaaaataacaaacaaacaaaaacataagcattcctgatgaaggaagtggtgggagcagccagttagctgaactagtatccatattctaagctcttcaggaagaggccagagagatctgtcacttgtataccgactcttggtcagtagcaaatggtcttactacctctatgctccaatgacaacaaaacaaatggctaattgggaataaaggggcttggggaaaacaatactggaaagatatctcaatcctggcacagactaccattatcactgttttccttttttttttttttttttctttaacgcagagtctagctctgtcaccaggctggagggcagtggcacaatctaggctcactgtcacctccgcctcccagttcaagccattctcctgcctcagcctcccaagtagctgggattacaggcacacgttgccacccccagctaatttttgtagttttagtagagacaggttttcaccatgttggccaggatgatcttgacctcctgacatcgtgatctgcccacctcagcctcccaaagtgctgggattacaggcatgagccatcgttcctggccctttttccatgttgatgctcatgggtctctgctttcttttgacagaccatttaattagcaggaagatcaacaggccaaaatttccaccataactgtaaacttgaatgtgcatgaatggaatacaatgtgttcaagccttgcaatgagaggcattataatgtatggtgctataattggtagtgattaccggggagagttaaaggacattttatacaataccactccagatttttttgctataagaccgcagatgcctgttgctcaattattagtggtaccttgtcaacaattatcccgtgaggaaatctctgccccaacagaggctacatacagaattgggggattcagatccactcctacaggtagcttaaatcctggagccaatatatggatacagggttcaacagatcctgcccctaaggctggtgaccttgtagctatgaaagcagaaaatgaaggcatagtacaatttcctaaagatgaaaaacaatatgttcccctctgtttttgttattacaaggaataacctatctactaatggtcagcacctgtgtctttgtgtctaaagccaagaataaattcatttactaggtagccactgctgcaacaaaagccaatcacagagaatgttggctgtacatcgagttgccagaggctgccaggaatgggctaccttgaagaatcgtccctgacaatatttctgaatggctatgtcgttatcaatggggccacaacaacaacacttgtaatccaacctggacttcctttcaccacactaagcaatctgtctttgcccaggtcagacaaaaggtgaactccaccctcaccttccatcaaaagccttggtattttgcccaatattcctggaacggtatatattggaaacctgctgtgctggtggctggattccacacagcccctgcttcatctggaggccttaaatggctcctctaatgttactctggggtttctccagacaattgtcaacacatactccaaatcaacaacattgcccccaatgaaccacaatctctttcctattttaataacacattagtacagtatgtttacagtaggtccatggctgtcccctggggggccctctgggtatgcagatcctgtgggtgttggtacctgcccccacactgggcagggagatcacttgtgggtggccattaattccattcaccatccgggataatatccccctcccaagtaatctggatgcttacaaacaccactggttatgaatgtgccggcctccttggtggcgataccttatcacagtattctcccctgccgctagaacaatcctgcttcaccaacaaattaaaatattaagcttatatgtagaaaaagctcttaatgatagtagcactggacttatgctgttatcagatgaatttgctcagctgcgtactgttgtgttgcaaaatcaaatggcattagatatgcttaccgcagcccaaggaggggtttgcgccttactgcatactggatgttgtgtgtatatccctggcaattctcacaatattagtctccttgcaaagccatgagtatgtttttttttttaaattgtgcttttaattctcctatgcttaccctgtatccataatctatgtcaactatgagttccccatgtatctataacggtattttaatacaattgagtaccgaattgaggccgaatgttgacgaaaagttaagtattaaatttgaactcaattgaacgtggacacaaataaaggtcaccaagtcttggcacaggttgtgtgagcccctttgaggcgttcattcagcactgtttcagagaagtctctatttcaatctattcctatatgttagttattgtaaaacaatagccaatcacaataacaagttgacctttttgtgtttcttgagcccagtcacaaagggccctcgtgactgggcttcatgccaaacaacttgttacaagaagagctagggtcccagaccacactaaagcttcaagaaacctctcctagtctgtgcaaggactgttggctgactctggagcccagactgttgcttcctggtctggtgataaatcctccatagtctggtgagtgtaaatatatatatatatacacacatatatatatatattcccttctccccttcccattgcaattttcttattatataaatttacttactatatctgcattgccatttacgtgggataaatcttgtttatctttaaaggtattttgtgtgtatgtcttttcttctccactcactcatttcctgcaaagaacaccatatttctcagagcctttgttggttcctttttattattttttctttaatcgtgtctgcatgccttattttagcaaagtggtcttcaaactctgatatccttcttctgcttggtcagtttggctattgatacttttgtatgcttcatgaagttctcgtgctgtgtttttcagctccatcaggtcatttatattcctctccaaactggttattttagttagcagttcctctaaccttttatcaaggttcttagcttcattgaattgggttagaacatgtttctttagctcagcagagtttgttgttaaccgtcatctgaaacctacttctgtcaattcatgcatctcattctctgttcagttctgtacccttgctcaagagacattttgatcatttggaaaagaggcactctggcctttcagccattttttgttgattctttctcatcttgagtttgtctagtttcaatcatttgagggtgctgacccttggatggtttttttttttttttggacacagtctctgtcacccatgctggactgcagtggcaccatatcagttcactgcaaattctgcctccaaggttcaagtgattctcatgtctcagactactgagtagctgggaatacaggcatgcacaaggatgcctggctaatttttgtattttttagtagagaggaggttttaccatgttggccaaagtattgggattacaggtgtaagccactatgtgcagccttggatgaggtttttgtgggtacttttttttcttgttgatgctgttgttgttgctttctgtttgtttttctttcaatggtcaggtccatcttctgtagggttgctgcagtttgctagggttcacttcaagccctatccatctggttcactcccgtgcctagagatgttactcaaggaggttggagaacagcaaagaagaatgtctgttccttcctctgtcatctctgacctcaagagacacaaatctgataccagtagaattgctcctgtatagggtgtctgacaattcctattgaaggtggaatggggagcagatggggagcagaacccatttaatgaagcactttgactgtcctttggtggagggaggtgttttgctgtgggaaaatccactcatctgggctgcttaaatccctcaaaactagcaggaggaaaggctaagtctgctggtccacagagactgcagccacccctcctgctagggttctgctctgatccttgttatttctttttttctgctgggtttgggtttggcttgttcttgttgctctagttctttgaggtgttatcttagattgtctacttatgctctttcagactttttagtaggcacttgatgctatgaacttcccttttaacaccactattgctgtatcccagatgttttgttagattgtgtcattattattgttcagctcaaagatttttaaaatttccatcttgatttcatacaacaatcattcaaaaacaggttgattgtaaattttatgttttatttaatttccatgtatttatttaatttccatgtatttgcatggtttgagggttcatttggagttgattttcacttttatcccactgtagtctgagagagtagttgatataattttgattgttttaaatttattgagacttgttttgtggcccatcatatgtctgtcttagagaatgtttcatgtgctgatgaataaaatgtatattctacagttgttggttagaatattctgtaaatatttgtcaagactgtttgttctagattatagtttaagtcctttttttgttgttgttgtcattgactttgtcttgatgacttgtctagtgctgtcagtagagtattgaagttcctcatcattattgtgttgccatttatcccatttcttaggtctagtagtaattttttaataaattgggagctccagtgttaggggcatatatatttagaattgtgatattttcttgttggactagtccttttatcattatgtaatgtcccactttgtctttttctttttttaagtgtttttgctttaaagtctttttgtctgatgtaagaatggctactgttgcttgcatttggggtacatttgcatggactatcttttcccaaccctttaccttaacttcatgtgtgtctttgtgtgttgggtgagtctctggaagacagcagatttttggttattaaattcttatccattctgctattctgtatcttttaagtggagcattaaggccactaatcactatcaattatatcaccatacattataatgtctgtcattgcaaggcttggaacacatagtaatccattcatccacattcaagtttgcagttataataaaaattttggcctgttgatcttcctggtgattaaatagtctgtcaaaagaaagcagagacacataaacatcaacatggaaaacagtgataatggtagtgtgcaagaggattcagatatcttcccagtattgtttaccccaaacctctttattcccaattaaccatttgtttcattaccattggagcatccaggtagtaagaccatttactactgaccaagtgttggcatacaagtgacaaatgtttctgacttcctcctgaatagctcaaaagacagctaactgggagctaactggctgctcccacccctttcttcatcagaaatgcttatgtttttaacaggattataggtcatggccttccaccatcaggtcccaccaatgtatttggtggatgcatcagtaaaccaagcatgcctgtgatcctctggacttagttctttaaaggagttgccccattgtacaagggaggtttccttgcctatctgcatgactttgttggtggtttactgagctgtcaagttttttacaccctcatgtaaaagtgataacccctttggttttggcttagactgatcttgtatgtaccatttccattttatgatgctactttcttgggcgtgccctatctgatgagattgtgtggaactcatgacccaagtcatagtaggaatttcaggtctcataaagacatcatggttgaagcagaggtgttctgtttccagcaaagcccaatagcaagctaagaatttcttcttgaaaggagtataaggttttccagcctctggcagtttctgagtccaaaacccaaaaggtagcctcttcccatcttgtttctgcctaaggctccaattagcatgttgatttaggatagttacttgcagttctactggcatatcccataagggctatggatccagggccagttgacttgcttgtttagcttgttcagaagccatgctctctttctctctccagtgaaagtcatcgtgttttctagtgactgcatgcagaggttgtaaaatgttactcaagtggagaatatcatgtctccagaatccaaacaagccaatacatttctgggcctccttttcagtggtaggggttgcaaattctagtatttcatcttagcctttggtaaaatggatgatttccctgcattccataggatgtaaaggaattttacactagatgcctgtccttgaattttactaaggttaatttcccatccttgagataggagctgggtttttacccactctaaaccccggctgcctagttcttcaattttatcctgatggggccactgggacagctgcttttttcatcaataggcagatatttctgagccttatcagtcaagacacaggcctgacatggggccagggccagtctggaagtcagattagaattttccttttccatcttacgtttctcttgtagcaaccatcccctatcttgatacattaacttataagcagtaagcaaacaccatccactctgggagatcccatcaccatctcctttgctgactggaatcccctgcagcacttcatgcacagtcaaattttaaattgcgctaatttagattcccaattctcacaaaggccagttcccctggaccattcaatcgccaaagaggaaaactgggggagttcccatccctggatatgggaattcctcgagtttccatccctgtccttctggccaaaaagcggcacaattttgttttcgaattctgtttatgatgccaaaaatgttctgtgtgggaaacgtgaaaggggagaagaaaagacacacacacaataccgttaagggtcaacaagttttatcccatgtaaatgggaatgcagatataataagcaaatgatataataagcaaatcaatgtaataagcagatttatataataagcaaattgcaatgggaagaggagaagggaaaagatatatgtatgtgtgtgtatatatatatatattgcccaccagactatggaggattcaccagcagactgggaagcaacagtctgggcttcagagtaagccactagtctgtgcacagatgaggacaggtctcatgaagcttcggcacagtctgggaccctagatcttttgtaactagttgtttggcctaaggttcagtcatgagggctgttcgtgaatgggctcaagtaacataaaaaagtcaacttgtttttacaattgtctattgtttttgaacaactaatatataggaatagatttaaatagagatttctccaaaagagcactggattaaagcctcaaggggctcacacaacctgttctaggacttgttgatcattgattgtgtccacgttcaaatgagttcaaatttaatatttaacttttcctccacaaattcctctgtcttgataaattggctgtgtctaggccatgggcaaggtgaaccccttggacagttacacaactctgccctctgggttcaagcgattctcctgcctcagccttctgagtagctgggactacaggtatgcaccacaacatccagctaattttttgtatttttagtagaaatggggtttcaccatgttggccaggctggtcttgaactcctgaccacaagtgatctgcccaccttggcctcctaaaatgttgtgattacaggtgtgcgccagtgtgccctaaataatttcttttttttttttttttttttgtatttttagtagagacagggtttcaccatgttggccaggctggtctcaagctcctgacgtcaggtgacccacccacctcagactctcaaaaatgatttctttctatctcctataacagtttgaaattacttaaagtttgtttcaagtagaaaaaataaaaagaaagtgaataaaaataaattgtagagttaaaaatattagaagaaattacaaaatatgtatgtaaacctggagtggccaaaaatcatgaatttgatttatttataaggttttattaaaattagctttagtgttgacaatacactattaccgaagtaaaagttgttgaatacattcaaaaagagagagagtaaaaaagagataggacccccattcaatcgctaggagatgagacagcagcagagatggaaaagaaactttataaaattcttctgaaattctgccacctttcttcatattgctcatgtttctcatgctgagagtagctgtgcactttgggtgtttacagagaaatttcttttaagggaatatattctgactgacttgattaaacttacatcttgtcagagctttttcttaggatctttttaactttcgtctctcaaaataatcttgctcagatggagatctgtttttctctccaatgctttttctgtttcagaagccctattagtatcccatggtgtctgaataaagtgggctgtcacagtgagaacttttggagctatcactatctagagacatgctggaaattcagcagtattttttccgtgtcacaattaaaagtagaaactaagcctgaaacactgctcccatttccattattgtgaaggttcaattctatccagggggcctgcaggctctcctcctgcagcttaggcttagctctctgatgtgacactagagtgctgctgtggcaaatgagattcacataaaatgtcagctgtgctctgggctgtgcctcagtggcagatgatagaggtccagagagaacactagcaaccaggagaaagcaagcaggaattctgtagcccagtgccagggagtacagagccactgctctaaaatgtaaatagccaaaaagatagaacactattaaaccatttttgaggcagagtgaaatcctaccttcagcaggcacctggctttaagctgctaaactacgtcctgttatgaagatgtgaaaagtttatttgtcgttgaatataagtaattagcatacacagatggcctcttcaatctccaggtgaatttaggatgaactatgtatgacatggtgctgtaaattcttctaattgtggactaattatggtgaccatctttctgtctttgtgatctgttaaacagattgactatgatgcttgttacattcaagcttagttgtgtaataaaaccattttctttctgttctattactgggaagtttctttggggctggagaacgttttttttctgtttcttttttctttttttcttttttttttttttttgagacagaagtctcactctgttgcccaggctggagtgcagtggtacaggtgtgagccaccacacccagcccgatttttctgttaactattgtttccaaacactgtctagaattaccagacatgatataaacacataaaatgccgaccagaatttactctagaggggattttccttctcaggcttccagtcaacttatacttatgcagcaaagtgcatgctgtcccctaaatacacaggcagaattgtgtctctgcctatttggtatctatagtcctctacagtcacttctagagaggctagaccacatttctacaaacttcacagggcagcaatcagtcactttacctctttcatggactcttgtatgttcagacctgaaactgattcagatactatgaagcccagaaacttattcagagtaacatgtgtgcattgagtagacatatacacacgagaatctccactttccccttcctcctcatgctaaaatgcccacaaatgtgcaggtaaaacctgctgcgactccagcaattcagaccttaaatctacagctccaaatttttaatcaaggtcttgagatttttatcttaagttccattttatctgaaaaatgcaagtcttttggttatcaaactcagagagacattaaaatgaaagtgcagttatgtatttctcccccctttgaactatgcattcatctcttgaaagtgttcactattggcacaagtagctataaattaaacaataatcaatgttatttctgtaaataaaaatttctgaaaaacaactttgtatcatcccagtccctgtctctctcttgtctgtagaaatcctcttttaactgctactaatcaaagtgtagattccaggcaacttgaatctttgctcccagattacaatccttaagttgacccaaataaactgtctacttatatttatgttgtgtcagcttttttttcttttctttgaggcagagttttgctcttgttgcctgggctagatggagtgccaaggccctgtctcggctcactgcaacctctgcctcctgggttcaagtgattctcctgcctcagcctcccgagtagctgggattacaggggcctgccaccacaccaggctaaattttgtatttttagtagagaagaagtttcaccgtgttggtcatgctggtctcgaactcctgacctcaggcaatccactcaccatggcctcccaaagtgcttggattacaggtgtgagccacagcacctggctgcttttttttttttaatgtacacttatcatttagaatgtgctagaggggcctctatgagggcatctctcctttgattgtactcctcttgctgtgacaccaaaggatgcagagacaagtttattttacctagaatctgcagataaggtctggctactgcctgggatttacagaaaagggccaaactttggatagaaaatgtacagaaaactaacaaaaggcattttctgcattgtgagatgtcaacatagatatcttacagcctccatttgggagtgtggaattatgagatttttcacatcttgttcattgacctgcgacagttatgtcagagtatccaggaggaaatagcatctgatggcagaatctgtaagtgtaaataagcatcttaggagtaagagatcaaggccacaaagtatccagagctataaccacaactatgtttacctgtaaaatgtgatttttgtattttacctgtaaaatgagtatttttttctttcttttatgcaagagctagcaaatcaggacaggtaatccaggttctggagctccagcaaggcagtttcattttctatttagaatcagcctgagcctctcccgactggattatcattgggctatcagctcagggtcactgggaattccttcaaaatcacctagatgtctttgaggtatttgaggatgtccagagcagaattgtgtcaggctgagaagagtggctaattctgtttctgtcttagtataagagaaatgaatcatcctgtgtttgttcctcccctcatacaagaggtgtcttcggttggtacccagatgagaatttctccagtgtcctggtatttggatgataaacaaggagtaaatctggaggcccaaatagataaactagtttcttccattttatatggccgttaaaaaaaatacatgaagcagtcatggttcctacaatccagaaacttttagtctagactagcaactggataaaaaattgaattgtgcatcatatggttggtccaacaaatagatgtgtccaaaatcttgggctttatttaggccactttctttatattgttgtgacttctgatgtctacatctgaaggcatacttatgaacagccttgttattataatttctttttcttgagaccgagtctgttgcctaggctggagtacagtggtgtgatctcagctcactgcaacctctgctgccctggttcaagtgattctcctgcttcagcctcctgagtagctgggattacaggtgcctgccacctcacccagctaatttttgtattttaggtagatatggggttttaccatattggtcagtctggtctcaaactcctgacctcatgatccactggccttgggctcccaaattgctgggattacatgtgtgaaccaccatgcccagccttataatttctatttcttttactttgcttagtgtacatatttattttctaataaaatttccctagaaaggccaggcatggtggctgaaacctgtaatccaagcactttgtgggggcatagacaggtggatcatgaggtcaggagtttgagaccagcctggccaacatggtgaaacaccgtctctactattaatacaaaaattagctgggcattgcggtgcacacctgtagttccacctactctggaggatgaggcagaagaatcacttgaacccaggaggtgggagttgcagtgagctgagatggcaacactgcactccagcctgggcaacagagtgaaactccctctcaaataaataaataaataaataaataaataaataaataaatgaaaaactagcctagaaaaccttaagggatttgtttaaattgcatattagtacatagtataaagttgacaaagcagtgtctagaaaagattaaaattacagaatctctgggatttaagtttcttttaggtaagcttagaaaaaacaaaactggtggtacttcagtggcatggagaacagaattcaacatagggtcctcactgcagtgtctcagacctgttcagatttatcctttttggaggccttatttaggtctgactgtaccttggagtctggcctcacagaactgagtagaagagatcagagttttggctggtgaatcctgctgtctttctagagctggtgttcacaatttcctgaaacccaaaagcagataaatgggaaaaataaagaatgtattttagggtcttagtttttaaaggctctattaaaaccagtgcttggagagacattctatttagcaactggttttttcccctgcagatccagtaattgctccacaagtcacaaaaaagtaaatataaagagaataaaattttctctaaactacgttaaactcttcctttattatatctctttcacctgtctgtatttagcttttattctgtacaattttattaaaaatttgagaaagagaaatagaagaagaaataaaaatgctgggccctttatctaaatcctggaaattattaaacactgagtaccagccgggcgtggtggctcttgcctgtaatcccagcactttgggaggccgaggcgggcggatcacgaggtcaggagatcgagaccatggtgaaaccctgtctctactaaaaatacaaaaaattaactaggtgctgtggtggatgcctgtagtcccagctactcaggagactgagacaggagaatggcatcaacccgggaggtggagcttgcagtgagccgagattgtgccactgctctccagcctgggcacagagcaagactccatctcaaaaaaacaaaaacaaaaacaacaaacaaacaaacaaaaaattgagtaccagatttcagggcattatgagaattaaatcacataatatgttatgcccagtacagtcctctgtatcctagttttgagcacatagtacctgtttaataagcattgtattagtacatgtgtacatgctgttttttaaatccagacttattcagacattactgccttctgtttcctctgtaaactttaaagagacagcaaagaatataaaactttaggatggagatgggttgtccatatttgtacccagaagtgtttgattgcgacaagagtgctgagtgttaagagaccatgggctgtgcctgctttctctaactaatgctagtaatgagacaaggggaagcaacatcagcactgacaggggacttgtttaaaatgcccattcatggactcttttcaaacctgcagaatcacattacataaagtggggccaaaattaccaagtcatttataagctcgttaaagcctgagaggcaatgcttagcttagtggttatcagcccaggcttctcattaggatcaaatggctaatttgcagaaatctcttgtgccctccccacagcttctgtttattgttgtgggtggaaggatccatgtttttgagtgaagggcctcatgtgactctaaggtgaggccagaatcaagtatgagggtttcaaaatacattcatgagcattaagttccatctttgcactaaacagcagtcacaggggtggtgctgtttggatttggtagggaaaggtcagtgtggcacatatttgcattactgtagcagaaattgctggtgtctctggcaggggagggcacctgaagacagaaaaggagaaatttatatttttatcttcatggagcagctcattattcctgaacttcttctgttttaaatgacagaaatgggtggactttttctgtctttttctgccagttgatgtcatgctagcaggtaaacatgtggtactgacacctttaaaggcatattctccatatgcaggtgtaatttgttcagagagtctcatctgagaaggaattctagagaaggaggagaaagaaaaaaaatggcttttcttcaggtaaacatgtgtcagatgaagagctatgtccactctgcctcctggactgccatgcatttagtacccacaaacctttacttctctacttgtgtttttcctccctaatgattttgatttaactacttcttaaaattcttatgatagtcaagggtctctgaaaaatatttttttcctatatcccagagccctccctacattctctacatcatagcttcttatatgtcatgcaggattatcagcaagaatttatgatctgcaatattaaaaatattccctttgtggctgttgaacatgaaaagatgtggatactcaagatttctactggagaaaactgtggtacttagtaaagatggagaacatgtaatgttacggctccatctgtgtgttccattagctctatgcagaagaagattaagaaaatccttatttaactgggatgacatttattactcagaaagttctgaaaaaaaattaggagatatctgctctctagggtggcaaatgaagcctccttaaaattactactaacaattacagaacataggagttatttgtattttgaagtttccataaaactgatgtttctttatggttaaattcagattctatttacttttttggggaaagaatatttcaacagtgatgctgtgttctcctgtgtgcattagcacgtcataaaaatttgtcctcctgcagttaatgattaatgaatcacttagtgaaattgctgacagatttttttttactatggagttaattagttttctctttattagtaagtatctttatgcagctgatgtgcataaatgatcacatttaatctggcagctgtctttttttcttatgtttttctacatatttttctttggtaaatgaaggctcttagttttgtttacaggcttgaaaaactgggaaaaataccgactcttgcacttactgaatatttgacaaaatatccttcttgggacaaaaacattggcattactggtgagcttgttagaaattcaaaaaattggctgagcatggtggctcatgcccgtaatcccagcactttgggaggctgaagtgggtggatcacctgaggttgtgagttcgagaccagcctgaccaacatgtagaaaccccatctctactttaaaaaaaaaaaaaaaaaaaaaattagccaggcgtagtcacgcatgcctgtaaccccagctacgcaggagacaaaggcaggataattgcttgaatccgggaggtggaggttgcagtgagccagatcatgccattgcactccagtctcagcaacaagagtgaaactctgtctcaaaataaatacatttaaaaatcagactttataccagatcttctggaaaaaaaaaaaccctgcaaaacaaggtcttcagcttattctacacatcaaaatttgagaggtgctttctaactcaacatgtcttttccatctgaaaaatattcacaagtcattttgtatgatgtaaatatagcactcaaaaatatacatgtttgtgttcatgtccttaattttatactttattatccagaaaaatatcattatatgaactgatcttgtggatattatgctgctcttttttctcagagatagagaatacattagaaaatatttgtgttgaaaattattttattggataattttagtcagtcctataagtcagaatgagtgctctttactctctcatttcaccttaagtcaaattaaaaattccgctcatggcaacttagtaaaaatgtgtgtgtgtgtgtgctttacagtgaccactgcaatttagggatgtggctatagaattctctctggaggagtggcattgcctggacactgcacagcacaatttatatagggatgtgatgttagagaactacagacacctggtcttccttggtgaggataacttgagtacataattcataatatatcctaaagattttatttctctttttatttttattttttgagatggagtctcactctgttgcccaggctggagtgcaatggtgcaatctctgctcactgcaacctcagcctcctgggttcagtgattctcctgcctcagcctcccaagtagctgggattacaggtgactgccaccacgctcggctaatttttgtatttttagtagagatgggatttcaccatgttggccacactggtctcgaactcctgacctcaggtgatatgcccgtcttggcctcccaaagtgctggaattacaggcataagccaacatgctcagcctatttctcttttttgtagaatgtttttagacctttattctttgcataaaaaactttcagatcccctttttccagaaaatcttcaaaatttgttcatttattaaagaatttcttcaagatgtttcatcttaatccaaactttccacattcctgagttgagctgtattcttcactctaaattagtggtaattccagaaatttagtggcataaaatatttttgtccccacctgaaaatcgaattgccaccaccaatttttgattcagcagtaccaggtagtaaaattaagaaacccacaaattgaaagtattttctaaatatttagaaatttctgttataacttagtattttgctattaatttgctagaatattttatcacattctctctgctgagcacattactagcttgtaattggagaatatgagaaaaatttatgtatttatttttaataaaacaggtattgttgtctctaacccagacctgatcacctggctacagcaaggaaaagaaactttgaccatgaagagacaggtgatgattgccaaacacacaggtaggtgttttttttgctctcacaaaggggcatcttctgtcttatgcttttaaattctctaaggattctgcttttcttttggtgagcttccttcaagttcacagtgagagccaatgtcctcttcatggcatagaagagactgcacaatctgactgcttttccattattttggggacacacaaatatctgcatgatgttgagaaactaaaactatgttttaagttcccttttttcatcaggtttgaaatgtgtgaaagtagtagtttctgttgcatttttttgttcatttttctgcacagtccattctgtttttattattatgtggccttgaaatatagtttcaaattataagtatgatatccttctgctttgttctttgtcttcatgattgcttcggctattcaaaatttattttagtttcatgtaaattttagaattgtattttccattactgtgaaaaaaaaccacagcaattttgataggaagtttattgaatctatagattactttggataatatggcactacaataatatttattctttcaagccatagacaaaatattttaaaatttatttggatcttctctaatttatttatttttttattgtaaaaatgttttacctccttggttaattttttcctcagaaatttactaattaatgctctagtaaataaacgtttttctttatcagacagtttaagtgcatgaaaccatacatacacttgtatgttaattttatattttgctgatttactgagtgtatttattagtttagataggctttaatgtactgtttatagttttttaaatgtatgattgtatgacctacaaacagcaactttttactcatttttcaatttcaatggttttttttaaatttctttgactaattcttctgttacatacttccagtgctacattaaaatagaagaattgacaaagggcacaatatagttttgtattggtgtctgaatttgatggagcagacacctcttcaagtttttgtaaactgattttagattgtaaagatcttcttttattggttccttagggtgatgagatgccatctgaatttgtagtgaagagggattgtagcttggtcacaaggctgctaggtctgcactagggttcacccttagttggcttgttacaggggcttgggttgttgtaattcccattttatttttggacagactaaatatccttcagtacttttctcagtagggcaggcactacagcatgtttttgcagtcgagtctgcatatgctgggccttaaatcaggatgtggatgagtgtggctttcatgagtatgagagagcatttcctcaggtaactgtgtgggtttctatgcaggaagaactgatcataaactgtggctcaggtaactgaaactgagtcattgaaccacttcagggacctgagtaaaggccaaggtctgcagacctgcctgcatggctgtaaataggtgccttcctctgggtctctagaatggcaggacctctcccagacagtggctgggaggagtttgggacggttatatgataagttcagaattctcagaatctcagtttgggaccaagttgggtgaactctatcctggtctgtagccataaacaggaatcctgcactttcccacctaattgagggcctgctttctgagtagaacacttttcaatcctaagctttaacagagtttcatcactccttccctggatctcaaatctctcttacaggcacttattttggagatggggtcttgctacataacccaggctggtctcaaaattctggcctgaagcagtttttccaccttaatgtacgatgtagctgtcattacaggtgtgagccataatgcctggttctctcataaaggcatttttgtcagggatggctgacattattttgctgtaaggggatatgaatgtaggggacttttaatcttttcatcttactgatgtcactctccctatacatttttactttccattttctatttcaaatttttctgtaattttagattcagatatttaggacaatatgctagaatttgcatggtatgcctgatgtagttagaaaattagtaggtactccatatttactaaaagagttacttataaatgtaagtttgctacaggcaaaaaagaattataggattttcatctactttcttcagcctatatataaataataacatagtttatttcccaatatttgttttacatatcagaggatctaattctattctgcaatatatacatgtatattttctgtctttaacaatgtaagactattctttgcttctaaagttagaatacagcagtttcattttgtgtaagaataacatattcaaaacataaaactaactctagtttttttaaatgcttatttattaaaagtttctcattagaatcttctatttatgattatactgcatattttctgaaattttactgccacacagtgcatgccaatgattcaaaatacctgcatttaatgagtacacagtaacagctaaatattgcagttacccagacaaatttttttaaattatttttttgagatggactcacagcctgtcacccaggctggagtgcagtgctgcaatcttggctcactggaaactccacatcctgggttcaagcagttttcatgcctcagcctcccaagtagctggaattacaggtatgtgccaccacacctggctaatttttgtatttttatgtgagatgaggtttcatcacgttggcaaggttggtcttaaattcctgacctcaggtgatctgcccgcctcagcctcccatagtgctgagattacagatgtgagccaatgcacccagcctgacaaattctttttaatgatacatcaatgttgcataccaggttttatgagtaaactcttctcttattattgttttgaagtttcacattagtgtgtttctttaatgaaggtttctgtttttttgggggggacagagtctcactctgctgcccaggctggagtgcagtggcatgatctcagctcactgcaacctctgcctcccaggttcaagcaattcttctgccacagcctcccaaattgctgggactacaggcttgtgccacaacatctggcagatttttgtatttttcatcgagacagggtttaaccgtattggccaggcttgtctcgaactcctgaccttgtgattcatctgcctccgcctctcaaagtgctgggattacaggcgtgaacccccgtgccaagcctcatttatatttcaaatagggtctcacttggttaaccaggctgatttgcagggctcactgctgcccgaacctcccaaactcagatgttcctctcacttcagcttctcaaatagctgggttacacatttttgccgtcacacccagcttgcttttttgtattttttgtagagacagagttttgccatttgcccaggctcctgttgaactactgagatcaagtgatcagcccaccttggccttccaaagtcctaagattacatttcattttattaagtagtttaattaatttatatttaaaataattgcttaaaaaatgaagttgttattaccagttatactgttattgttttatgtgtttctagtagttatatttttctcattttctgttttactttcttaattttcacttaatcttgtactagcatgctttgattatattttgttttcttttgcatactttctataaatattatctttgtaatcagcttgaaaactgaagattacatacaccttaaagttaaaaaacaatatattttaatcttataacggcctccattgaatacaaaaactatgcttctgtattttccagtttgttgttaatattaaaattattattattattttttgagatggagtctccctctgtcgcccaggctgtagtgcagtggcacgatcttggctcactacaacctccgtcgccctggttcaagggattctctgcctcagcctcctgagtagctgggattttaagctcctgccaccacgcccagctatttttgtttgttttagtagagatggggtttcaccatcttgaccagtctagtgttgaatgcctcacctagtttatatggtgtatctattcacagatttatgcggatttacatattgttttttatattccataaaagcactttaaaggttttatgtaccatcattttggtttttttgttttgttttgtttggtgtgggattatttttttcagactgagtcttgctccatttcccaggatggagtgcagtggtgcgatcttggctcactgcaacctccacctctcggcttcaagcaattcttcttcctcagcctcctgagaggctgggattacaggtgcctaccaccatgccctgctaattgtttgtatttttagtatagatggagtttcaccatgttggccaggctggtctggaactcctgacttcaagttatctgcccgcctcagcttcccaaagtgctgggattacaggtgtgagccaccacttccagcctgtaccatcattttgatagtaaagaattccatatgtgtccatttatttacattagtgtatagctttatatttatatatgtttttatgatgctgtccagggtcaatttgtgtttcaacataatggacacattctaacatttctgtatttttagatatagaatctcattatgttgttcaggttgatgttgaacttttggtctccagtgatatgactgctttggcctctgaaagatgtaggattacagacatgaacaattgtgcctgagcctcttgtagtatttttttttacttttttttttttttgagacggagtctttctctcctagctcaggctaaagtgcagtggcacgatcttggctcactgcagttttcgcctcccaggctcatgcgattctcttgcctaagcctccctcccgaggagctggggttacaggagcatgccacaatgcgcagctaatttttttttttttgtagttttagtagagatggagattcaccatgttggccatgctgctctcaaactcctgacctcgggtgatctacccgccttggcctttcaaagtgctgggattacaggcttgagaaaccgtgcccggcttttatttttttaaatttttttaagagtgagtctcactctgtctcccaggctggagtgcaatggcatgattttgactcactgcaactcccacctcctgggttcaagcaattctgcctcagcctcctgagtagctgggactacaggtgtgtgccaccatgcctgggtaatctttgcatttttagtagaaatggggtttcaccatgttggtcaggctgatctcgaactcctcacctcaggcaacccacccaccttgacctcccaaagtgctgggattacaggcatgagccagtgcacccaggcccatgtattatattatgagagacagtgatagttgtgatgaatactctcaccttttattttggaaagtctttatttttatcttctttttgaagtaaagtaattttgaatcgagtattgttagaaattttttttgttacatcaaaattggggaagttttcagtttttttaatcttcgtgtaacctctatattactttttccctatattctaagatttgtttcatgaatacattgatctacttcatggtatccaataagttttatattctatgttttacttttgttccacaattttatatttttgtgttatatatattttgggtatgccacatcacaccagttaattgtattttaattttttagtttatattataattgtatatgacaatttttaactctgtacaatttaagacagtatggagcaaaattaaatatgaataagccatatgtctattgccaatataattatttatatgtttgtttgcctggataaatattatctttgtattttttgtcacttgtatatttattgtgtaggtttgctgtaacagttttttttttttttttggaagagaggtttgctcttgttgctcatgctggagtacaatggtgtgacctcagctcactgcaacctccgcctcctgggttcaagtgattctcctgcctcagcctcctgagtagctgagattacaggcatgcaccaccatgcccagcgaattttgtatttttagtagagacggggtttctccatgttggtcaggctggtcttgaactcctgacctcaggtgatctgcctgcctcagcctcccaatgtgctgtgattataggtgtgagccaccattcccagtctgtaacagttttttaatcctgtctaggtgagtagtcataaaaattctcctgatttcagcatttatttatgtgtgaatctatattttttcggtgggggagaaacacctaaagaaatgtgttatgtgtcaaaaacacataacaaaatttacaataaaatatttctaggctgggcacagtggctcacacctgtaatcccagaactttgggaggccgaggcgggtggatcacgaggtcaggagattgagaccatcctggccaacatggtgcaaccccgtctctacaaaaatgcaaaaaattagctgggcttaggtggcgggtgcctgtaatcccagctactcaggagggcgaggcaggggaatcgcttgaacacaggaggtggaggttgcactgagccgaagttgtgccgctgcactccagcctgggaggaagggtgagactccattttaaaagaaaaataagtatatatatatgtatataaatatatatatgcttctaaatattcagtttggtcatattaattctgttgacattgttatgcaacatatcactagaatatttttatcttgcaaagctaattctcaatagtcattaaacaactaccaattctagggccgggcgcggtagctcacgcctgtaatcccattactttgggaggccgaagcaggcgaatcatctgaggtcaggagttcaagaccaacctgaccaatgtgcagaaaccccgtctctactaaaaatacaacaaaattagccgggcatggtggcgcatgcctgtaatctcagctacttgggagcctgaggcaggagaatcgcttgaacgcgggaggtggaggttgcggtgagccaagatcgcaccactgcactccagcctgggcaacaaggtcctaactcggtttcaaaaaaaaaataataataataaagaaagaaagaaacaactaccaattcttctcattttgtggtacttttcaaacaccactctgttttctgtttctaagagtataattgctttgtatatctcatacaatctctgtctctttgtggatggcttattttattttgcataatgtcatcaatatttatcttaatagttgttagaatattttctgctttttgaaatctgagtgatattccagtatttttatatctactgaatgatttggagacagaaatttgcattgcttttacctattggcttccagtaacaatgttacaatagttatgtgaaagttaatatatgtgctgcattctgttttattagtctacattttcacctttataatcataccgaattgttgtaattctatacgtttttgatgtgtttgaaatcagaaattgtaatgcctccaacattgttcctttttctcaagattgttgggtactttattatctctttagattccatatacttttggagttggtgtttttgtttcttcaaaaatgcaatgagaaatttgagaaagattgtattaaatctgtagattaaattgagcagtatagacatcttcacaatattaattatttcttttttcattgtttgtttttgagatggggttaaattcacccacctcagcctcccaaaatgctaggattacaggcatgaaccactgcacccagcccagttatttcaacaagtgcatgctcaagagtgtgttgtatcatttctatatagatgtaaatttatcatttatttatattattgttttgtactctaattctatttttgtcatagaaaataatctatgaaatttcagttgtaaataatgtgttaagactttgtttttggcctaacaggtggtctataaagaagaatattgtatgagctatcgagaaggctgtgtatcctgatgttgttgaggagtgttctctataccttcattagaaataattgttttttactgccttctagtcctctgttccattactaatattatgtcttgttttattattattacagaaagtggggtattgaaatatcctactataatcatattgctctctctgtattcaattttgttagtatttgcttgatataattgaaaccctaatttgagacacacacagaaaaatacacacacgtgtataaacaaatttgtcataggttcccagtgaatgaatctatatattgtttaacgcccttctttgtctttttgaagttttgacttaaagtacattttataaaatatgacagtttttttacttaagatgtagcttgtgtaatattattttgacctcttctgctgtaatttggttaatatttatataaaaattctacttttgtcttgcaactttcagtcttttcttgtcattagatctcaactgactctttaaaaaggtaagttgagtctgatttttaaaactttttaatgaacctttttattgaaattatgtctcttgaatggaaagataattgtatatatttaaatagttttctgaaagagaaaaacttagttattttaattgttttatttgattattgtatccttgtgtgtcattttctctgtctttttgtgttgttttgatttttatattgacatgctttcagttttctcttattgttttttgtgtatccatatggattttttttagtggtatcttagggaattacctaaaacctctaaaagattcaacaatatattttaatgtagtaagaaattagcttcagttgcatacaaaaattcttattacatctgccttaaactttgttactgactttactaattacattttttatgttgtatattcatgaacagatgcttataatttctatacatttatcttttaaattttaaagaataattaaaaaagttttctgtaccattatgataatgttaagtaagaaattctatttttatgtgtgtacatatctttcccagaaatttatgtattttcatatgattatgtgttgttttcttgcattacgttattttctgtagaagaaactcctttcagcgttcttgatatgtaggacatatgcagtgccaatataattctcaagatttggttattttggaagaacttctttctatttggtagtacaattttgctcttatggtaatactcccatttgacaacttattttgaaattataattttaaaaatatcacagtttccttctgatctgcaaaaatttttttgataaattcactggttatctgatgagactatgcttatagattattattatatttatcttgcagcttgcaaaattcttatctgtgatttttgaaattttgcttatatatgtgtttgttataaatatatgtttgagtgtatcctagtttgttcagctttttcatgtttaccccattttttcttacttttaagaaatttttcagttttttttacatccactattttcattttctgctattttaatattttttgtggttaatctcatttttccgatcttcagtagttgtctgtgtttctatataacttcctggatattattcaatttattttatttatttattattctttttttttttttttttctgagatggggtctcaccctttcacccaagctggagtgcagttgtgtgatctcggctcactgcaacctctgcctcctggattcatgcaattctcctgcctcagcctcctgaggaactgggattacaggcacctgccagtatgcctggctaattttttgtgtttttaaatgaggtgggttttccccatgttggctaggctgatcttgaattcctgatttcaaatgaactgcccatctcagcctctcaatgtgttgggattacaggtgtgagccaccatgcttggcctattttattttatttttgagacagagtcttgctctgttgcccaagctttagtgcagtggcacatctccactcaccgcaaacttcccttcctggattcaagcaattctcctgtgtcagcatcccacgtagctaggattacagtcagataccaccaggcccactaatgtttgtatttttagtacatacagggtttcaccatgttggccaggctggtctccaactcctgacctgtgattctaccaccttggcctcccattgtgttgggattacaggaatgagcctccaaatatggtctgttcaatctattttgaatttttaaaattactttatacatttttaatgattgcttttgaaaattttataatttttttgatggggcaatgttgccttaatattttgtatacattgtaatctttgatcgatatttgaacattaacaaaaagccacctgttacaatctttataatatagctctgtcctggcatagtctgaaatcaattgtcttggctagagattctgggaatttctcaaacctgtttttaggaggtgtcttgtctaaaattttgtgtttattgtttagttaaatcagtttattaatatttcttcttaataatcagtaatcacttgctacacccatttcctgtttggggtactgcagtttctctgcttttgtaacatttaccttaagccttggcagactcaaactgtcattccaacatatatcaccatttctttcagcattttatgttgtgggagaccttaaccagtgccttaaaaagtccctagaagccagaaataaagatgtatgtgccaatatttttcttgtttttttaaaaagaaaccaggagttggcaatttacatttgtgtgtgtgtgagacagagtctcactctgttacttaggctggagtgcagtgacattatcttggctaacaacagtctctgcctccagagttcaagcaattctcctgcctcagcctcccaagtagctggattacaggtacctgttaccatgcctggctaatgctttttatttttagtagagacgggtttttaccatcttggccaggctggtcttgaacacttacttacccttgtgattcaccgacctcagcttcccaaagtgctgggattacagacttgagccatcctgcctggccaggaatgtacatttaaaggcacaatgttatactggagagcaggaagaagtgaagaatatttcttctaaagacagccattagaaatataaagggggttgtagtgcctttacttgcatcatagatcttattgcacacattttgtactagaggaaaaccctgaagcagttgctcaagctttgttcaacattggaatttatattggagaagagtcctgaaatataatgaatttaaaaacacttatatttcaaaaactacagcttagaaaacaccagagagtttatactaaaatatatttttgcagatgcagtaaatataaaaaaaattaatttaaaattgattttatgtaaatatcagagaatttacggtagaataactaaggcactgacatttcagacattacagcaaatcagtgttgagtataaaaactaatctacagctacagctgttagataaattgcttgtatataactttaaaaggagtagatttttgaagcatggtaattctattgaaagtatacttatttgcggccttgagcagtggctcatgcctgtaatcccagcactttgggaggcagaggtgggcagatcacgaggtcaggagatcaagaccatcctggctaacatggtgaaaccttgtctctactaaaaatacaaaaaaattagctggatgtggttgcacacacctgtagtcccagctactcaggaggcttaggcaggagaatggtgtgaaccctggaggtggagcttacagtgagccgagatcacaccactgcactccagcctgggcgacacagcaagactctgtctcaaaaaaaaaaaaaagaaagtatacttattcgcttgaaaaaaattttttgaaaagtgaataatgatgtaatacaggtttcaagttactttatgctgttattttattcctatattattcacacatgaaagcatgtgatcaattgttgatgcatcagagatactagacattgttttttattagttgggcattatttattaccttttctataaaagagtaagaacattaaaatgtaagatgcatgatgaaaatgtaagtggagaggctctttgtagtaaacctctattaagtaatgtataaggtggtggtttgtgttctcatttgtgtaatcctagcctatgacttaatgttgacactttgctttgtcttttggatggcctaacctacattaacatatacgcagaacattttaaacctttttttcaaaaatcataaagaattactttatcaataaacaaaggtaaacaataagctgagggttcagagtaatacttttctacattatagtgagagaaataaattattaattatagtcaaaagtattaaaataaattagtattgcaggctgggcgccgtggctcatgcctgtaatcccagcactttgggaggctgaggtggacggatcacgaggtcaggagatcgagaccatcctggcaacacattgaaaccctgtctctactaaatatacaaaaaattagccgggtgaggtggcaggcgcctgtagtcccagctactcgggaggctgaggcaggagaatggtgtgaacccgggaggtggaggttgcagtgagccgagatcgtgccactgcactacagcctgggggacagagcatgactcagcctcaataagtaaataaataaataaataaataaaaataaaataaaataaattagtattttactaattgtacttttaagtaataaaatgtattacatttaaaaattgttagattatgtgtgaacttaatttttttaccatgttaagcctattgtgcatttaatgaagcattttttttaatgaagcattattatgccactaactttaaactatttctccttacccaagcgtgtaaataaaagatggtagcaatatactatttggtatatagtggaataacatctctagtaatcactttgccaatggctttaaactgtaaatgtattgaagaatattgttcccataggtcaaatttttattctttattcttattgaaatgtattattagtatttatgagtatgtagtatgtgtatatatttatgccttatatggcatattttgagttaggcatataatatatagtaattactttagggtaaataagatagccatcagctgggtgtggtggctcatgcctgtaatcccagcactttgggaggccgaggtgcgtgaatcatgaggtcacgagattaagaccatcctggccaacatggtgaaaccccatctctatttaaaataaaaatattagttgggcacggtggtgcgcatctgtaacctggaatcccagctacttgggaagctaaggcaggagaatcacttgaacctgggaggtggaaattgcagtgagctcagaatgcaccactgcacttcagcctggtgacagagtgagactctgttaaaaaaaaaaggtatccatcacttgtagcatttatccttttattacaaactgtaattatacatttttagtgtataatttagtgagaaggattgcctggtgtcaggatttcaagaccattttgcccaacatggtgaaatcccatctgtactaaacataaaaaatttagttgagcatggtggcacacgcctagaggctgagtcaggaaaatcacttttaactccagaggtggaggttgcagtaaggcaagatcatgccattgcactccagcctggttgacagagcgagacttcatctcaaaaaaagagaaagaaatataaataaaatccttacatttctgagtcctgaaaaattattaaatatttgttatatagttttcttttaacatttggtctctctgcctgcgaacatatagacttttagttttaatttatgtggggaaaagtgagagaaatcagattgttactgtgtctgtgtagaaagtagacatgagactccattttgttctgtactaagaaaaattcttctgccttgagatgctgttaatctgtaaccctacccccaaccctgtgctccctgagacgtgtgctgtgtcaactcagggttaaatggattaagggttgtgcaagatgtgctttgttaaacagatgcttgaaggcagcatgctccttaagagtcatcaccactccctaatctcaagtacccagagatgcaaaacactgtggaagaccgcagggacctctgcctaggaaagccaggtattgtccaaggtttctccccatgtgataacctgagatatggcctcatgggaagggaaagacctgaccatcccccagcccaacacccataaagggtctgtgctggggaagattagtgaaagaggaagacctctttgcagttgagataagaggaaggcctctgtctcctgctcatccatgggcaatggaatgtctcagtgtaaagtccaattgtatattccatctactgagataggggaaaactgccttagggctggaggtgagacatgctggcagcagtactgctctttaatgcattgagatgtttatgtatatgcacatcaaaagcacagcacttttttctttaccttgtttatgatgcagagacctttgttcacgcgttttcttactgaccttctctccactattaccctattgtcttgccacatccccctctctgggaaatgcccgataatgatcaataaatactaagggaactcagaggccacggcaggcaggcgcggttcccccttatgctgaacgctggtcccctgggctgatttttttttctctatactttttctctgtgtctctttcttttccaagtctctcattccacctaacgagaaacacccacaggtgtggaggggcaacccagcccttcaaatttacatagagttaaatatacacatattactctgaagataaatcttaggtgtaagaaaagtattaagtgagtgtttgtgtgagtatgagtttgtacatattttcaggagaaaagagcaataattgcaacaaaatgaataaataaggtgactaatagaaaactaaacacctcaaaaatgctgaaagcaaatctatactttttgctttgtcttgaattcctttattcattttattttattttatttttttgagacagagtttcactcctgttgcccaggctggagtgcaatggcacgatctcggctcactgcaacctccaccttttgggttcaagtgattctcctgcctcagcctcccagtagctgggactacaggcacatgccaccatgcccagttaatttttttttttgtatttttagtggagactgggttttaccatgttggccaggctggtctttcattcctgatctcaaatgatccatccacctaggcctcccaaagtgctgggattacatgtgtgaactgccacattcagtgtgtcttgaatttattaatgtaaaatgttatggcttatggtttggattctccctagaatctgcctattaaagcacaggcatctttgtcttcagaaatgacactcttgagtagaacaataaaaaccctcttcaaacagaaaaaaataatcatttttaacacttattttaatgaaaatttaaccaacattgagtaattggatatatttttattgttttatgtgtgtgtgaatgtataaaatggtacatacaggaaaaataattcaagccagaaaaaagatgtaagttaatatttgtaatgaatgaaactggagagtagttaattattatttgcagataatatatttgtttatgtagataacaaaaggagcagaaagactattttaaaagtttatttaggtgggtaggcaacattttaagataataccctggattaccagtctgttgcacacctgctgtgtcatactttcctcttgagtgaaaaaaaaatgtatgactgtggtgggaaatcactcatgaaattaggttactcaactgttgactttgtgtttatcaaaatggagattattctgattgtgttaaacttaatcacaggtgcttctaagagaaagagacacatagaaaaacaacctgctggcctgattgttttgtgtgtttttctgtgctggcttactttacttggcataatatttttcaggttcatgaatattgttgcaaataacaagactttcttatttttaagtgcagagaagtatttcattgtgtacatataccacattttctttttctattcaactattgatggacacttaggatgattccataccttagctattgtgagtaatccacttccttccctctgttttgttttgtttgagatggagtctcattctgttgcccacgctaaagtgcagtggcacgatctcagctcaccgcaacctatgcctcccaggttcaagtgattctagtgcttcagcctcctgagtagctgaggttacaggtgtgcaccaccatgcttggctaatttttgtatttttagtagaggcaggctttcaccatgttgaccagagtaactttcatttgtttgtatatatttttcttccttttctatttctagaagcatgttaattttaaaatataaattatgaatgttaaaaaccttcattctctgtctttgattactattacaactgatttaaaaataagtttttttgaaattccctggataaaggttattacttcattattaacataacttgagacagcatagaaatgaaagtgaatatttgatagtaaaacagcaattatgtagctcctggtagtcatttaatctctcacccactctttggaacttctatcaagacaagaattctatttttgaaatgcttatgtttttaacaggattataagccacagccttccagcatcgggtcccaccaatgtatttggtggatccatttgtaaaccaagcatgtttctgatcttctgggattagttttttaaacgatttgcgccattggtcggggtgggaagggtggtttccttccatatctacaggacttgctcagtggtttttttgagctggcaagttttgtacatcctcatgtaaaactgataccccctttggttttggcttagcctggtcatgtatgtaccatttccattttatgctgctactttcttgggcatgccctatctggtaggttttgggggaactcatgtcccaagtcacaataggaatttcaggccacataaagacatcatggttgaagcagaggtgttccatttccagcaaagttcaatagcaagctaaaaattgcttcttgaagggatataatctttgctggcctctggcagtttgtaggtccgaaatccaaaagtaccctcttcccatgttgttcctgcctaaggctccaattagcatgttgatctaggacagttacttgcagttctactggcccatcccctataggccatagatccagggccagcttcaccacttgtttagcttgttcaaaagccatgctgtcttcctctccccaaagaaagtcatagcattttctagttgctgcatgcggaggttgtaaaatgttacccaagtggggaaaatgatgtttccagaatccaaacaagacaatacatttctggacctccttcttagtggtagaggttgcaaattgtagtattttagctttagcctttggtaaaatggactatttctctgtattccataggatgccaaggtgttggggtgatcagacccaacaccaggtcataggggctatgaagtctgatagagtcaaagaatgagacaagacaagttaaaagttcatagggtgggtccagggggccaactccaagcatggtggctgtgaagaccccaagctctgggagcccatgctatttataacttataacttattggtaatcaaacaaaaaagcagttggtgaggacatgtggacatgggggtagacaggtgaggatgtgcggatagaaaggtagtggtgaatcaagcgtagctgtgatggttgagcatatgctctgctacttgagataaaggagaacaggttcttctaattcaagacacaatcaatttatggtctcaggagagcaagaagcaatgggccaacgagtctggatacattccagaggctacaaggggttttatgccctgagcctgggttctgtccaagccacaaggggttttatgccctgggcttagactgtagtgtggcagggcagccttccaccctttggcacagagcttggtgttccacaggccacaaggggttttagaccctggaaccaggacatgttccaagactcttttatattatgtcagacaagcaagccctgcctcagctcttctgccaacaccaaggaattttacagtttgtgcaggtcctttgaattttactaaggttaatttcccatccttgagataagagttgggctcttacccgctccaagccccagctaactagttcctcagtttcaccctgaccaggccatttagacagctgcttttttcagcaataggctgatagctttgagcctgatcagtcaagtcataggcctggcattgggccagggccagtctggaagtaaaattagcattttccttttccagcttacatttctcttgtagcaactagcccttatcttgacacattaacttataagcagtaagcaaacaccatccactctggcagatccctcagcttctcctttgctgactggaatctcctgcagcacttcccgcacagtcaaaggtttaaattgcactaatttagattcccaattcccacaaagagcagttcccctggaccattcaaaagggagaactggaggagttcccatcgcgggatatgaggagtcaccgagcctccagccctgtccttctggccaaaaagtggcacacttttgttttgaatcctgttcgtgacgccgaaactgttctgtgcgggaaagaggcaaggggataagaaaagacagacacacaatacctttaagggtaaacaagcttcatcccatgtaaatggcaatgcagatatattaagcaaatgatataataagcaaaaaaaatataataagcaggttgatataataagcaagttgcaatgggaagaggagaagggaaaagtttgtgaagtttacgctcaccagactatggaagattcaccaccagagtgggaagcaacaacctgggctccagagtcggccacccatttgtgcacagatgaggagaggtctcatgaagcttcagtgcagtctgggaccttagctcatttgtaacaagttgtttggcatgaggcccggtcatgagggccctttgcaactgggcttaaggaacacaaaaagattaacttgtttttgcgattgtctattgtttttcaaaaatgaatgtatatgaatagattgaaatagagatttctccaaaacagcactggatgaatgcctctaggggctcacaaaacctattctgggacttggtgaccattgcttctgtccacgttcaattgacttcaaatttaatatttaactttacctccacaaattcctctgtcttgatgaatcggctctgtctaggcaaagggcaaagcgaaccacttgggccttacacaacctttacctcctcgattcaagcgattttcctgcctctgcctccgaagtagctgggactataggagtgcaccaccacaccctgctaattctttgtatttttagtagagatggtgtttcaccatgttggccaggctggtcttgaacttctgaccccaagtgatctgcccaccttggcctcccaaagtgctgggattaaaggcgtgagccaccatgcctgtccctgaatgatttctttctatctcctataactgtgaaatcacttaatggatgtttcaaactgaaaataataaaaagaatgtacataaaaataaaatacaagaagtcataaaaattagaagagattacaaaatatatatgcatatctcgaggggtcaaaaatgagaaattttgtttatttacagcgttttgtttatttatttatttaattttttttgagatggagtctcactgtgttgcacatgctggagtgcagtggtgtgatcttggatcaccgcaacctccacctccctggttcaagcaattctcctgcctcagcctctggagtagctgggaccacaggtgcatgccaggaggcctggctaatttttttgtattttcagtagagacgtggtttcaccatgttagccaggatcgcctcgatttctttctatgtcctatagcagtttgaaattacttaaaagttgtttcaaattgaacaaataaaaataatgtgcataaaatataaatagtttaaaaaattacaagacattacaaaatacgtatgtaaatctggagttgtcaaaaatgacaaatttgatttatatataaggttttattaaaattagctttaatggatactacactattaccaaagtaaaagttgattttctcttgaacaaaaatttgttgtattattaatatgacagcaaaatacttctgttcaccttttgaatacattcaacaggagagagtaaaaaagaaatagaattttcccatgctctgggatgtaagaattatccaatcagggacactgtgctggaaaccgtccaatcaggcacacagctgtagcgaacagcacggcttccgggtttggcggggcctttgtgtctctctgcagcctgagctccaggtctcttcttcactgctctgtgtcctctgcccctagaggcccagcctctgtggccctgtgtcctgtaggtattaggagatccacagctaggacgccgggatcccggaagcccggaaatggtaagaatgccggtccgacatcccgagagagggggaggggctggttggaaccggaaggaaatgtctttggcaagactcagctccagtcagtcagctccacaatttgtgccccgagttctccttacccagctcggcctcagtcctgttcagccataagatggcggctacacagaagcctggccccctgggcgtcctctcttccgtgcgcaatgactgtgtcctggcctggagccctctgtgggcagctctgcatctgcagcgctgtgtctctcccagattgtacagggatcatgagagggtcgtcaagggagaatcctgacttggggttcaggttcatgaatgggaagagctttggtccgtggggttcacagtttctcttttctcctattaaaaatgtatggggccaggagtggtggttcatgcctgtaatcccagcactttgggaggccgaggcgggcggatcacttgaggtaaagagttattagaacaagtaagttcctcttcaaagactcaacttctttgtcataagttgtaaatcaaatttatccctgctttccccttctccttttgttgcaaattgctcgtttaccctatttggaaaaagctggggtctaagccaaccgggatcagcttagattattgggtctgacccaagccaatagaggaaggacacaaaaacaggaactgtgttagggttaataaccccttcctggctgggtgcggtggctcatgcctgtaatcccagcaatttgggaggctgaagcgggctgatcacgtggtcaatgtaaggctcttgtattggtttgaaccgtgagagcgtgccaacagacaacaccaggcagtgtggagcaacatgctgttttagtgagtgccagggtgcaggccggctgaggcctacaatggcgtcagcaccaaatgaggacgaggcaggagttttattgtctccagtaaacaggaagtctcccagtctgatggggctgctacgtagtacccagacagcctctttctcaaacttcagggttacatgtcttctggccagagttgatgtcttccagacggttctcttcctgcttctgctatcttgctggcacacactgctgatgcaggtaggcttgcgccttgggactgggcctgggaagggaggagttactcatcccttcaagctttcagaccccggggagattctttctttcctctctttttggttatagaaagaaagggaaaaggggtgactttctcaataactacttcaggtgtgacatagggggtggcattggaaccttggaaaaaggtgcgtggctgggtttagatgggagctggttaatttttggggtattcttgagagacgggttggtgtccatcgtgttgttgaagcagaagcatcatctggattgtctggcagttaactgtagtttcaacgagagttttaatggcttttattattagtgggataacacaggcgagaaacaggaggaacctaatgataaaggtaactgtccctaccagccttttaaatcctcctaaatgaaagaaccaccctcctaggaggtttgttgggccacatcccttccaggtttagactggtacatgggctacttttctcatgtttgaagtgatttctagaacaacttttctgttatcatctatgttaagacagcaattaggatattaaacttaccacagattccaccctttcctgctaataagtagcctagtgctggcctgttttgataaattgctgtgcgcatttgattttgttgttgtgtgaacatttccaaggctgagaccgtttggttagtgattatctttagaacagcctgtaattattctatttagcatatatatgggagtgcgataacctcatgaaccatcctctgcctaaatggcagggccataatattcgatgatccattgcagaggccactcgtcttcttgcacagggactccaagggtgtcacctgctgttaatgttttggaggaaggagtagccttggagatgagcttgaccctggtgtgatggatccagtgggggagttcttggactctcactacagttggcatgctgagtatgacagtgtaagggcctgtccactttggttgtaccttttggtgagggctgggttggcagataaacatgtctatgcctgcaaggcagttatgttgagaggacaaggaggtgctgacagggagaggcatggcctcatttgctgcttcacgaatgaaagactgtgttggattaagtaggggaggtaattcctgagtggctcggagtctggtaaggatggaggccttaagacaaaagtatggctatgtatgattttgaagggagtataaaaagagggtgcttttggtgttgtgtggagtctcatgagggtgaaagggagatttcttgtccacaactgacaggtttctagagctagcttggtgagttgggttttaaggacagagttgactttttaaactttgcctgaagattgaggcctgtagggtgtatggggaacctatttgattcttaaggatgtagagacaccttgggtaatttggctgataaaggtgagcctgttatcatactggatggatgttgggagtccgaaacggggaattatatgcatgatgagagtttgtgtgatgacatttgcaccttctgaagttgttgggaatgcttctacctacccggagaaagtacagacaaagactggaagatagcggagccgtttatcgggcagcatgtgagtgaagtttacttgccaatcttgcctgggtaccttgccctgggcttggtgggtaggaaaaggtggtggccagggtaagccttggggtgacactaagtggcatatagagcaggacagggtgattccttgaacacagcaggaaagatgaggacaagtgagaatagggtggagaaattgagggagaagtttgtaactgacatggaaagagttgtggagactttggaggatagggattgtttgagattgaggaaggatgaagcacccttccttgacataccatggtccttgcttttgaaggtttttggcctggaagtcctctttttctttggaggagtgaaaaggagggaatgaggacagggacagagcatggctgggtttagatgcgagctgttagcacagtgatgtggggagtttctatgaatagagcatacagttggaggagcagtggggcagagatgagacttagtacactggggtgagctagcatgtctttgatgttatgggttgaataaactgttaggttggcatggagagatagttttaggctttcaagggtgagaacagcagctgccgtcaaggctcagagacaggcaggtcatccaagaactgtggcttcaagctgtttagagagttaggcaacatcctggagggtgggtcccttatactgggttagaacacctagtgcaactctacgctgttcgtcggtatagagggagaaaggtttggtaaggtctgcgtctgggagaacgaggataggggctgagttgagagccttttggagtagacagaaaggttgggtaataggctgtgcagggtttaaaggctcatggagagggcctttagtggcttggtataacggattggcaagtagagcgaaggaggaaacctagagactaaaatatcccgctagtcctagaaaagagaatttcttgctagtttgtggaggcgggagggactggaggagggatatgtggttggttgtgagccttcggtttcgtggggtaagagctaggcctagataggtgactgagggggtgcatatttgagttttaggggagacctgatacccccattctgccaagaagtttaaaagaaagatagtatgggcgttgcagtctctttgagaggggctacacaagagcagatcattagcatattgaaggggagtggatggtgttaggaataaggtacagaggttgcaagccagggcctgcccaaaaaggtggggactgtctctgaaaccctgaggttactacttcaagggtaggtgggcacagcctggtgggcttacctgagggggcatggcctggtgggcttatctgggtatgcaccaggtgaaaggtgggtgtcggggttttcctacgtaaaggcaaagaggtcctgagaatcagggtgtgaaggaattgtgaaaaaaagcattatttagtttaggacagaaaaatgggtgatattgtagggaaccacggaaagtaaagtgtatgggttagaaactactggacatactgggagtacagcttggttaataagcctagggcctggactaagtgataagttccatgtagctttttaacaggtagaatcagtgtgaaaaggggagtttgttgggcagagtaggtgattggcgaggaggcgagaaatgatagggtttaggcctacaagagctgcttgggggttggatactgcttctgtgataggaactgggtggggtttttaagggtaatgtgaacgggggcgtggtgttctgtcactgagggtgtggaagtatcctaaacagtgaggttaactatggatggggaataaggaaaggctgcatgttttaaggtgggaggttggaggagaagaagaaaattagaagcccccgaggggtctgggtagatgcgttgggtactatggggaatgtggaggtggagagtagtgtggagttttgagaggatgtctctactttggaggggagttgggcatgagggcaggactaagaaagagtgagtaaggaaaaggtgtgcagggaccagaaaagtggaggagtggctcatggtttggacacttgtccatcaattcctacaacagactgggaggactgggaaattaggtaaagcagagtaggttgccccagtattaattttaaaaaacatactggcctacctgccaccatcagtgttacccttggctcagatgaagatatggtagttgctgggatgccctttccagggcaccatcagtcttcagcagcaaggctggtgagatccaagtaggaggttttggctggctcaggaagggatgagggcagtgcttctgggggacgctcacagtctgacttccagtggagtcctccatagagggggcacgaactggtgggcttacctgggtttgggcattgtctggaccagtggccttcattgccacacttgaaatgtgcaggtgcaggtggattcctaggggcttccatgtggagctgtggccccatgggcctgcagggcccctgatggcggaggcaagcatttgaaactctgcctgtttttgccttttactttcctcatcatgattgttaaagactttgaaggctaaattaagatctttttgtggggtttgtgggctgttaccaagcttctggcttctgaagcttgtgctgaatatcaggggtggattgggaaatgaactgaaggtttaaaatagtggttccttctgagctggttgagtctacgttgttatattttctcatggcttcaggtaaacaagagggagaaaaagggctgggttttcatcaggacattgggtgatttctgaaagtttttcatagttgactgctttatgggcaccttttgagtcctgcaaggagacacacaatcatgtggtcttgatagtggcatccagggtccctgtcttgataatcctagtgggggtcctggttggggactgcctctgtaccagtagctgggcaagagcctggtgattaattgtattagcatgtgcctgagctagggtccagatagtctcagtcttctggggtgagagttgaagagaggataatgtagaggtcatgccaagttagttcataagactgggtaaggtactgaaattccctaaaataagaggtagggtcttttggaaatgaaccaaatcttttgttaatttgagagagatcagtgagggagaagggagcatgaactctcacaataccttcagctcctgctacttcccaaagggggcactctagcaccgacactgaagtaagggtggggcatgggccaaagatggcacctgagtgagtatggatgggagagaaggaagaagtcggaagtggttcctactgaccatttgaagggagaaggggggttgagttgataggcagtggaggatagataggggtgtaaggtggttggatgggtttacaggcctcaagagagggcggtgggggaggagactgggtacaggcaatactagaattgtcctgaggaggggacgatgtaggaaaagaagtggatactgctgactgggaagatggcagctgagaatataaagaggaggcttggggggttatagaagacagttgagagggagaggtaggggctgtgaggggtggacagcagtctgctggatccagtaagaaaaaagacgtagggttgggaggagaaaggtgatcaggtcggtgagaatggagaagtatttgaacaagtgagcaagaattgcagaggtcttgttgtgatctgagtgcaaaaaggcctggacataaggcatttctgcccatttttccagcagtcagcaataattgctttaatcagttaaaattgtaaagtcgaatgttccatttgtgggccatttggacccattatccaattcataatgtggccagactgaattgcaaaaaaagacaaggtgcttagggcagatatcttgcctgaggcctaaggtttgcaggttttttacaaggcagcctagaaggctgtccttcagaatggaaaactgggaattttctataatggagggtaggcactagagaacagagaaaaggagaccgtcctggatagccggatggagacaataaaaggagcagttgtcatcactgcctttttcattcctggaacgggatcagatggcttagaggggttcccctaaggccagatgatcagctagtgcctgacacatgccagagccttcttggaccaacattggatttttggacacaagaaccaagagaggccatacagatttttccctgttaagcgggctcccacagaaagctaccagtaggtgagatcactgactgatgtgcatgtacagagaggcaactggaggctgaggagcttcttttgtccagctgctgtggcctgctctccagggcagaggggtaggtccatggggatgcagacatcagctctcctgggttttggcaccaaaatgtaaggttcttgtattggtttgaaccctgagagcacactaacagacaacatgaggcagtgtggagacacatggtgttttaatgagtgcctggttgcaggcgggctgaggcctaaaatggccccagcaccaaataaggatgggtcagggatttcatggtctcctgtaaatcagaagtggcccagtctgacatggctgctatatagtacctggacggcctctttcttgatcttcaggagtacgtgtcttctggccagggtgggtgtcttctggccatctctctttctactactgctatcttgctggtgcacactgctgatgcaagtagccttgtaccttgggactgggcctgagaagggagttactcatcccttcaagctttcaggccccggggagaatctatcagtcaagagttctagaccagcctggacaacatggtgaaacccgtctctactaaaaatacaaacattagtggggcgtggtggcaagagcctctaatcccagctacttaagaggctgaggcacaagaattccttgaacccgggaggtggaggttgcagtgagctgagatcctgccatcacactccagcctatgtgaaagagccagactcattctcaaaaaaaaaaaaaaaagaaaaaagaaaaaaaaaaggtaagcatcttaaaatttcctttgtttatttaaacactgtgagtaatttcactggatttttcaaacacttagtttcaaacacgaagtgaataactctgacatggaaattaaagcttgaacctagtgattccaagctaagactaatactaagcctacaacaggaggtttttgttgttgttattgttgtttttgagacagagattcgctcttgttgcccaggctggagtacaatggcacgatcttggctcactgcaccttccggttcaagtgattctcctacctcagcctcaagagtaactgggattacaggcatgtgccatcacacccagctaatttggtatgtttagtacagacggggtttctccatgttagtcaggctggtgtccaactcacaacctcaggtaatttgcctgcctcagcctcccaaagtgctgggattacaggcctgagccaccgcgcctggctaacagtaagttattaaaggcctactgtttttttctggggagcctcccctgcagatgtcccagcctgcgcatcctagcaatggaaggagcctttatcctgagagaagctacagagtcctggaaagctggggccccacagcttgatgcagttaagatgaagacgaaaggaaactgggaggttctaactgataatgaagttattgttttgaggcattttttagactttgtaaaataacaacgtcagatttatgttaaaaaaaaaaaacgaattccaaaatgtattgcaacaggaggaagtatcaactaactataaggcctttatggcttgcaaaaatgtaggcagaaaagggctttctttcctagggaggagcaaacaatattggaaaggaggtgggaggggaatggcaaatggagggtgaaaaagtcagattttagatcagagaatgtcataccctgaaatcagcatgttcttagtagggacataaaatggggttgtatgttgacacagactgagagtagctcaaagttcaggagcctgagggagaaagataaacttaagtaaagtttgattaagaaatattttattttaggctgagctcaatggctcacgcctgtaatcctagcactttgagaggcagaggcaggtggatcacctgaagtcaggagttcaagacctggctaacatggtgaaaccctgtgtctaccaaaaatacaaaaattagctgggtgtcattgcagtcatctgtaatgccagctacttgggaggctgaggaaggagaattgcttgaacccagaaggcagaagttgaagtgagccgaggttgagccactgcactcctgcctgggtgacacagcgagactccatctcaaaaaaaaaagaaaagaaaagaaaagaaaatgcttatttaagtgggatggcatttattaaccagaaagttctgaaaaaaattattaggagataccagctctctacggtgctgaatgaagtctacttaaaattactactaaggtgattccgttccaagatggccaaatagggacagctctggtctacagctcccagtgtgattgacacagaagatgggtgatttctgcatttctaactgaggtacctggttcatctcattgggactggttggacagtgggtgcagcccatggaggcagagccaaagcagagtggggcattgcctcacccagaagcacaaggggtcaggtgatttccctttcctagccaaggaaagccatactttcaccaaagacagtgcctgaaaaaataggaaacttccacccaaatactgtgcttttccaatggtcctagcaaatggcacacaaagagattatatcccatgactttcttggtgggtcccatgcccacagacccttgttcactgctagtgcagcagtctgagatcaacctgcaaggcagcagcctggcagggggaggggcgtctgccactgctgaggcttgagtaggtaaacaaagcagtcaggaagcttgaactgggcggagtccaccacagctcagcaaggcctctgtctctgtagactccatctctgggggcagggcatagctaaaccaaaggcagcaaaaacttctgcagacttaaacatccctgtctgacagctctaaggagagcagtggttctcccagcacagtgtttgagcttggagaacatacagactgcctcctcaagtgggtcactaacccccgtgtagcttaactgggagacatctcccagtaggggctgactgacagctcatacagccaggtacccctctgggatgaagcttccagaggaaggatcaggcagcaacatttgctgttctgcaatatttgctgttctgcagcctccactggtgatacccaggcaaacagggtctggagtggacctccagcaaactccagtagacctgcagctgagggagctgactgttagaaggaaaactaacaaacagaaagaaatagcatcaacgttaacaaaaaggacatccacaccaaatcccatatgtaggtcaccaacatcaaacaccaaaagtagattaagccaaaaagatggggagaaaccagatcagaaaagctgaaaattctaaaaaccagagtgcctcttctcctccaaaggatcgcagctcctcgccagcaatggaacaaagctggatagagaatgactttgaagagctgacagaagtaggcttcagaatattggtagtaacaaacttctctgagctaaaggaggatgtttgaacctatcacaaggaagctcaataccttgaaaaaagattagacaaatggctatctagaataaacagtgtaggaaggagcttaagtgacctgatggagctgaaaaccatggcacaagaactacatgacacatgcacaagcttcaatagctgattcaatcaagtggaagaatgggtatcagtgattgaagatcaaattaattaaataaagtgagaagagaagtttagagaaaaaagagtaaaaagaaatgaacaaagcctcccagaaatatgggactacgtgaaaagaccaattctacgtttgattcatgtacctgaaagtgacggggagaatggaacgaggtagaaaacactctccaggatattaaccaggagaacttccccaacctatcaaggcaggccaatattcaaattcaggaaatacagagaacaccacaaagatactcctcaagaagagcaaccccaagacacaaaattgtcaggttcaccaaaattgaaatgaaggaaaaaatgctaagggcagccagagagaaaggtccggttacccacagactgaagcccaacagactaacagcagatctcttggcagaaatgcgacaagtcagaagagagtgggggccaatattcaacattcttaaagaaaataattttcaacccagaattcatatccagccaaactaagattcataagtgaaggagaaataaaatcctttacagacaagcaaatgctgagagattttgtctccaccaggcctgccttacaagagctcctgaaggaagcactaaacatggaaaggaaccaccagttccagccaccacaaaaacatgctaaattgtaaagaccattgatgctaggaagaaagcccatcaactaacaagcaaaataaccagctaacatcataatgacaggatcaaattcacacataacaatattaaccttaaatgtaaatgagctaaatgccccagttaaaagacacagactggcaaattggataaagagtcaagacccatctgtgtgctgtattcaggagactcatctcatgtgcagggacacacataggttcaaaacaaagggatggaggaagatctaccaagcaaatggaaaggaaaaaaaaaaaacagtggttgcaatcctggtctctgataaagcagactttaaaccaacaaagatcaaaagagacaaagaaggccattacctaatggtaaagggatcaattcagtaagaagagctaactatcctaaatatatatgcacccaatacaggagcacccagattcataaagccagtctttagagaagtacaaagagatttagactcccacacaataaaaatgggagactttttagacagatcaatgagacagaaggttaacaaggatatccaggacttaaactcagctctgcaccaagcagacctcacagacatctacagaactctccaccacaaatcaacagaatatacattcttctcagcaccccatcacacttattctaaaattgaccatatagttggaagtaaagcactcctcagcaaatgtaaaagaacagaaatcacaacaaacagtcttgcagaccacactgaaatcaaattagaactcaggattaagaaacttactcaaaactgcacaactacatggaaactgaacaacctgctcctgaatgactactgggtaaataacgaaatgaaggcagaaataaagatgttctttgaaaccaatgagaacaaagacacaatgtaccaaaatctctgggacacatttaaagcactgtgtagagggaaatttatagcactaaatgccaacaagaggaagcagcaaatatctaaaatcaacaccctaacatcacaatagaactagagaagcaagagcaatacgcattcaaaagctagcagaaggcaagaaataactaagatcagagcagaactgaaggagatagagacacaaaaaaccctttaaaaaatcaatgaatccaggagctggttttttgaaaagatcaacaagatggatagaccactagcaagactaataaagaagaaaagagagaataatcaaataggtgcaataaaaaatgatgaaggggatatcaccaccaatcctgcagaaatacaaactaccatcagagaatactataaacacctctatgcaaacaaacttgaaaatctagaagaaatgagtaaattcctggacacatacaccctcctaagattaaacaaggaagaagatgaatctctggatagaccaataacaggctctgaaattaaggcaataattaatagcttaccatctaaaaaaagtccaggaccagacagattcacagctggtttctatgaggaggagctggtaccattccttctgaaactattccaatcaatagaaaaaaaaggaatcctccctaactcattttatgaggccaacagcatcctgataccaaagcctggcagagacacaacaaaaaaaggagaattttagaccaatatcactgatgaacatcagtgcaaaaaacctcaataaaatactggcaaactgaatccagcagcacatcaaaaagcttatccaccacaatcatgttggtttcatccctggaatgcagggctggttcaacatacacaaatcaataaacataatccatcacatacacagaaccaaagacaaaaaaaccacatgattatctcaatagatgcagaaaaggcctttgacaaaattcaacaaccttcatgctaaaaactctcaataaactaggtattgatgtaacatatctcaaaataaaaagaggtatttatgacaaacccacagccaatatcatactgaatgggaaaaaagtggaagcattccctctgaaaacttgcacaagacagggatgcccactgtcaccacttctattcaacatagtgttggaagttctggccagggcaatcaggcaagagaaagaaataaaggtattcaattaggaaaagaggaagttaaactgtccctatttgcagatgacaaaattgtatatttagaaaatgccatcgtctcagcccaaaatctccttaagctgataatcagcttcagcaaagtctcaggatacaaaatcaatgtgcaaaaatcacaagcattcctatacaccaataacagacaatcagagagccaaatcatgagtgaactcccattcacaattgctagagagaatcaaatacttaggaatccaacttaaaagggatgtgaaggacctcttcaaggagatctacaaaccactgctcaatgaaataaaagaggacataaacaaatggaagatcattccatgctcattgataggaagaatcaatatcatgaaaatggccagactgcccaaggtaatttatagattcaatgccatccttatcaagctaccaatcattttcttcacagaattggaaaaaaactactttaaagtatatatggaaccaaaaaagaccccacattgccaagataatcctaagcaaaaagaacaaacatggaggcattatgctacctgactttatactatactacaaggctagagtaaccaaaacaccatggtactggtgacaaaacagatatatagaccattggaacagaacagaggcctcagaaataacaccacacatctacaactatctgatctttgacaaagctgacaaaaacaagatatggggaaaaaattccttatttaataaatagtgttgggaaaactggctagccatatgtagaaagttgaaactggatcccttccttacaccttacacaaaaactaactcaagatggattaacgacttaaatgttagacctaaaaccataaaaaccctagaaggaaacctaggcagtaccattcaggacataggcatgtgcaaggacttcatgactaaaacaccaaagcaatggcaacaaaggcaaaaatagagaaatgggatctaattaactaaagatcttctgcacagcaaaagaactaccatcagagtgaagaggcaactttcagaatgaaaaaaaatttttgcaatgtacccatctgacaaagagctagtatccagaatctacaaagaacttaaacatatttagaagaaaaaaaacctcattaaaattgggcaaataatatgaacagacacttctcaaaagaagacattcatgcagccaacagacatatgaaaaaaatggtcatcattaccggtcattagataaatgcaaatcaaaaccacagtgagataccatctcacaacagttagaatggcgatcattaaaaagtcaggagacaacagatgctggagaggttgtggagaaataggaatgattttagactgttggtggaagtgtaaactagttcaaccattgtggaagacaatgtggtgattcctcaaggatctagaacaagaaataccatttgacccagtgatcccattactgggtatatacccaaaggattataaatcatgctactataaagacacgtgcacatgtatgtttattgcagcactattcacaatagcaaagacttggaaccaactcaaatatccatcaatgatagactggattaagaaaatgtggcacatatacaccatggaatactatgcagccataaaaaatgagttcatgtcctctgcagggacatagatgcagctggaaaccatcattctgagcaaactgtcacaagaacagaaaaccaaacaccacatgttctcactcataggtgggaattgaacaatgagaacagttagacacagggtggggaacatcacaccctggggtctgtcatggggtggggtgcagggggagggatagcattaggagaaatacctaatgtaaatgatgagttaatgggtgcagcaaaccaacatggcacatgtatacctatgtaacaaacctgcacattgtgcacatgtaccctagaacttaaagtataataataaaaaataaaaaaaagtactactaaaaattatggaacataggagttatctgtacattgaagtttgcataaaacatgtttctttaaggttaaattcagattttatttactttgtgttggaggaatatttcaacagtgatgctgtgttcttctgtgtgcattagcacatcataaaaatttgtccagtgcagttaatggttaatgattcacttgcttaaatagctctctgacagattttttcactcttcagttaattatttttctcttcattattaagtatctttatgcagctgatgtgtataaaacgctatacttaatctggcagctgcccttttttcttattttttcttcatatttttctttggaaaatgaaggcttttatctttgtttacaggtgagaaaaacttggaaaacccaggcttttccacttactggatgtgttacaaaatatccttcttgggccaaaaacatagacagtattgctgagcttgttagaaattaaaaaaatcagactttatgtcggatcttctggaaaaaaaaaaaaagaaaaaaacctgtataacaaggtcttgaacttattgtacatatcaaaatttcagaggtgtcttgtagctcaatatgtctttttccatctgaaaaatatgcacaactcattcagtatgatgtaaatatagcactgaaaagtgtgtatgttgatgttcatgctcttaattttatactttgttagctacaataacatcatatatgaactgatgtggatcttatgctgttctttttttctcagagttaaaaaatacattagagaatatttctttgttggagattattttcttggataatttaattctataagtaagaaccagttccttttactttccaatttcaccttcagtcaaaataaaaactctgcccatggccacttggtaaaaatgtgtgtgtgtgagtgtgtgtttgtttcaggggccattgcaatttagagatgtgcttacagaattatctctggaggagtggcattgcctggatactttacagcaaaatttacatagcgatgtggtgttagagaacaacataaacctggtctttcttggtgaggataactttaatacataattcataatatactctaaaggttttctttctcttttttgtggaatgttttttagtaatgtattcattgatcaaagagtttcagaacccattttccagaaaatctttagaaatttttcatttagaaaagaatttgttcaagatgttttgtgttaatcaaaactttacacattcctgagttgagctatattcttcactctaaattagtgataattccagaaatttggtggcataaaatattgttgtccccacctgaaaatctaattatcagcaacaagttttgattctgtagtaccaggtagtaaaattaaaaaacctacaagtaggctgggcgcggtggcttatgcctataatcccagcacttcaggaggctgaggcaggaagatcatgagatcaggaattcgagaccagtctgaccaacatggagaaattccatttctaataaaaatacacaattagccgggcatggtggcacatgaatgaaatcccagctaccctggagactgaggcaggagaattggttgaacccagaaggcagaggtttcactgagccaagatcgtgccattgcacttcaacctgggcaataagggggaaactctgtctcaaaaagaaaagaaaagaaaagaaaaactgatgaattcaaagtgttttctgggagccaagatggccaaataggaacagctccagtctacagctctcagcatgagtgacacagaacacgggtgatttctgcatttccaactgaggtaccaggttcatctcactggggagtgccagagagtgggtgcaggatactgggtgcactgcaccgtgtgtgagccaaagcagggtaaggcatcccctcacccaggaagtgcaaggggtcagggaatttcctttcctagtcaaagaaaggggtgacagacagcacctggaaaatcgggtcactcccaccctaatactgtgcttttccaatgagcttaacaaacggcacaccaggagattatatcccacacatggctcagagggtcctacgcccatggagccttgctcattgctggcacagcagtctgagatcaaactgcaaggcagcagagaggctgggggaggtacgcccaccattgctcaggcttgagtaggtaaacaaagctgccagaagcttgaactgggtggagcccacctcagctcaaggaggcctgcctgcctctgtaggctccacctctgggggcagggcacagacaaaagaccgcagtaacctctgcagacttaaatgtctttgtctgacagctttaaagagagtagtggttctcccagcacgccgcttgagatctgagaatgggcagactgcctcctgaagtgggtccctgacccctgagtagcctaactgggaggcatctcccagtaggggtggactgacacctcacatggccgggtactcctctgagacaaaacttccagaggaacaatcaggcagaagcatttgtggttcaccaatatccactgttctgcaaccactgctgctgatacccaggcaaacagggtctggagtggacgtccagtaaactccaacagacctgcagctgagggtcctgactgttagaaggaaaactaacaaacagaaaggacatccacaccaaaaacccatctgtacgtcaccatcatcaaagaccaaaggtagataaaatcacaaagatggggaaaaaacagagcagaaaaactggaaactctaaaaatcagagtgcctctcctcctccaaaggaacgcagctcctcatcagcaatggaacaaagctgagcggagaatgactttgacgagttgagagatcaaggcttcagaagatcaaactactccaagctaaaggaggaagttcgaaccaatggcaaagaagttaaaaaatttgaaaaaagaattagactaatggataactagaataacccatgcagagaagtccttaaaggacctgatggatctgaaaaccatggcatgagaactacgtgatgaatgcacaagcctcagtaaccgatgcgatcaactggaagaaagggtgtcagtgatggaagacgaaatgaatgaaatgaagcatgaagagaagtccttaaaggacctgatggatctgaaaaccatggcacgagaactacgtgatgaatgcacaagcctcagtaaccgatgcgatcaactggaagaaagggtgtcagtgatggaagacgaaatgaatgaaatgaagcatgaagagaagtttagagaaaaaagaataaaaggaaatgaacaaagcccctaagaaatatgggactatgtggaaagaccaaatctatgtctaattggtgtacctgaaagtgacggggagaatggaaccaagttggaaaacactctgcaggatattatacaggagaacttccccaatctagcaaggcaggccaacattcaaattcaggaaatacagagaacgccacaaagatactccttgagaagagcaattccaagacacataattgtcagattcaccaaagttgaaatgatggaaaaaatgttaagggcatcccaagagaaaggtgggttacccacaaaaagaagcccatcagactaacagctgatctctctgcagaaactctgcaagccagaagagagtgggggccaatattcaacattcttaaagaaaagaattttcaacccagaatttcatatccagccaaactaagtttcataagtgaaggagaaataaaatactttacagacaagcaaatgctgagagattttgtcaccaccaggcctgccctaaaagagctcctgaaggaagcactaaacatggaaaggaacaaccagtaccagccactgcaaaaacatgccgaattataaagatcatcaagactaggaagaaactgcatcaactaatgagcaaaataaccagctaacatcataatgacaggatcaaattcacacataacaatactaatcttaaatgcaaatgggctaaatgctccaattaaaaggcacagactgacaaattggataaagagtcaagacccatcagtgtgctgtattgaggaaacccatctcatgtgcagagacacacatgggcttaaaataaagggatggaggaagatctgccaagcaaatggaaaacaaaaaaaggaaggggttgcaatcctagtctctgataaaacaggctttaaaccaacaaagatcaaaagagacaaagaaggccattacataatggtaaagggatcaattcaacaagaagaactaactgtcctaaatatatgtgcacccaatataggagcacccagattcataaagcaagtccttagtgacctgcaaagtgacttagactcccacacaataataatgggagactttaacaccccactgtcaacattagacagatcaacgagacagaaagttaacaaggatatccaggaattgaacacagctctgcaccaggcagacctaatagacatctacagaactctccaccccacatcaacagaatatacattcttttcagcaccacaccacacctattccaaaattgaccacatagttctatggaagtaaagcactcctcagcaaatgtaaaagaacagaaattataacaaactgtctctcagaccacggtgcaatcaaactagagctcaggattaagaaactcactcaaaaccgctcaactacatggaaactgaacaacctgctcctgaatgactactggctacataacgaaatgaaggcagaaataaagatgttctttgaaaccaacgagaacaaagacacaacataccagaatctctgggacacattcaaagcagtgtgtagagggaaatttatagcactaaatgcccacaagagaaagcaggaaagatctaaaattgacaccctaacatcacaattaaaagaactagagaagcaagagcaaacacattcaaaagctagcagaacgcaagaaataactaagatcagagcagaaccgaaggagatagagacacaaaaaaatccttcaaaaaaatcaatgaatcccagagctggttttttgaaaagatcaacaaaattgattgaccgctagcaagactaataaagaagaaaagagagaagaatcaaatagacgcaataaaaaatgacaaaggggatatcaccactgatcccacagaaatacaaactatcatcagagaatactataaacacctctatgcaaataaactagaaaatctagaagaaatggataaattcctggacacatactctctcccaagactaaatcaggaagaagttgaatctctgaatagaccaataacaggctctgaaattaaggcaataatcaatagcttaccaaccaaaaaaagtccagaaccagatggattcacagctgaattctaccagaggtacaaggaggaactggtaccattccttctgaaactattccaatcaatagaaaaagagggaatcctcccaaactcattttatgaggccagcatcatcctgttacaaaatcctggcagagacacaacaaaaaaagagaattttagaccagtattcttgaacattgatgcaaaaatcctcaataaaatactggcaaactgaatccagcagcacatcaaaaagcttatcctccatgatcaagtgggcttcatccctgggatgcaaggctggttcaacatatgaaaatcaacaaacgtaatccagcatataaacagaaccaaagacaaaaaccacatgattatctcaatagatacagaaaaggcctttgacaaaattcaacaatgcctcatgctaaaaactctcaataaattaggtattgatgggacgtatctcaaaataataagaggtatttatgacaaacccaaagccaacatcatactggatggacaaaaactggaagcattccctttgaaaacttgcacaagacaaggatgccctctgtcaccactcctattcaacatagtgttggaagttctggccagggcactcaggcaggagaaggaaataaagggcattcaattaggaaaagaggaagtcaaattgtccttgtttgcagatgacatgactgtatatttagaaaaccccatagtctcaccccaaaatctccttaaactgataagcaacttcagcaaagtctcaggatacaaaatcaatgtgcaaaaatcacaagcattcttatacaccaataacagtcaaacagagagccaaatcatgagtgaattcccattcacaattgcttcaaagagaataaaatacctaggaatccaccttacaagggatgtgaaggacctcttcaaggagcactacaaaccactgctcaatgaaataaaaagaggatacaaacaaatggaagaatattccatgctcatgggtaggaagaatcaatatcatgaaaatagccatactgcccaaggtaatttatagattcaatgccatccccatcaagctaccactgactttcttcacagaattggaaaaaactactttaaagttcatatggaaccaaaaaagagcccacattgccaattcaatcctaagccaaaagaacaaagctggagacattatgctacctgacttccaactatactacaaggctacagtaaccaaaacagcatggtactggtatcaaaacagagatatagaccattggaacagaacagagccctcagaaataatgctgcatatctacaactatctgatctttgacaaacctgacaaaaacaagcaatagggaaaggattccctatttaataaatggtgctggaaaaactggctagccatatgtagaaagctgaaactggatcctttccttacaccttatacaaaaattaattcaaggtggattaaagacttccacgttagacctaaaaccataaaaaccctagaagaaaacctaggcaataccattcatgacataggcatggacaaggatttcatgtctaaaacaccaaaagcaatggcaacaaaagccaaaattgacaaatgggatctaattaaactaaagagcttctgcacaacaaaagaaaccaccatcagagtggacaggcaacctaaagaatgggagaaattttttgcaacctactcatctgacaaagggctaatatccagaatctacaatgaactcaaacaaattcacaagaagaaaacaaaccccatcaacaagtgggcaaaggatatgaacagacacttctcaaaggaagacatttatgcagccaaaaaatacatgaaaaaatgctcatcatcactggccatcagagaaatgtaaatcaaaaccacagtgagataccatctcacgccagttagaatggcaatcattaaaaaggaaacaacaggtgctggagaggatgtggagaaataggaacacttttacactgttggttggacggtaaactagttcaaccattgtggaagtcagtgtgacaattcctcagggatctagaactagaaataccatttgacccagcaatcccattactgggtatatacccaaaggattataaatcatgctgctataaagacacaggcacacgtatgtttattgtggcactattcacaatagcaaggacttggaaccaactgaaatgtccatcaatgatggactggattaagaaaatgtggcacatatacaccatagaatactatgcagccataaaaaattatgagttcatgtgctttgtagggacacggatgaagctggaaactatcattctcagcaaactatcacaaggaccgaaaaccaaacactgcatgttctcactcataggtgggaattgaacaatgaggacacatggacataggaaggggaacatcacacactggggactgttgtggggtgggggaagggaggagggatagcattaggagatatacctaatgctaaatgacaagctaatgggtgcggcacaccaacatggcaaatgtatacatatgtaacaaacttgcaagttgtgtacatgtaccctaaaacttatagtataataataataacaataaaagtgttttctaaatatttagaaatttctgttttaacttagtatttttgtattaatttactagaatattttatcacaccctctcagctgagcacattactagcttgtaattggagaatatgagcaagattcatattatttatttatttatttttatttttttgagacagagtgtcactttgtcacccaggctagagtgcagtggtgcgatctgggctcactgtaagctccacctcccagattcatgccattctcctgcctcagcctcccgagtagctgggactacaggtgcctgccaccatgtgtggctgattttttgtattttttagtaggtacagggtttcactatgttagccaggatggtctcaatcttctgaccttgtgatccacccaccttggcctcccaaagtgctgggattagaggcgtgagccaccacacccggtctcatgttatttatttttaataaaacaggtattgttgtctccaagccagacctgatcatctgtctggagcaaggaaaaatcctttgagtatgaggagacatgagatgattgccaaacacccaggtgggtgcaagtgaaagtgaatacaacagacgacacaggtaagagatcccaaggtgaaagagaaagccagtacttaaaatgtgatttgggaagctgtgttccaaaggaaatagttcctgggcggttgttttataatttttctctcacaaagggacatctgctgtcttatgctttcaaattctctaaggattctacttttctttcagtgagcttccttcaagttcacagtgaaagccaaagtcttcttcatggcatataagacactgcacaatcttgctgcttttacattgttttgatgacacaaaattatctgcatgattttaagaaactaaaactattctcaaagttctctttttgcattttgaaatgtgcgagagtagtagtttctgttgaatttttttcattattctgcacatttccattctgtttttattactatatagtgttgaaatatagttggaaagtataagtatgatatccttctgctctgttcttttcatcaagattgctttggctaatcagtttattttagtttcatgtaaattttagaattgtatttttcattactgaaaaagacaccactgcaattttaataggaagtttattgaatctatagatcactttagataatatggaactctaataatatttattctttcaatccatagacataaaatactttataatttatttggaacttctctaatttctttcactgattttttttggtaaaggtttttcatttcattggttaatttttttctcagaaattatttaatgctataacaaataagatttttttgtcctatttttatcagatagtttgatttaagtgtataaaaccgtacatatacttgtatgttagtttcatattttgtaatttactgagtgtatttattagtttagataggatttaatgtactgtttattagtttttaaatataatattgtatgatctacaagcaaaaactttttagttttcttaaattttaatggatttttttttatttctttgagtaaatcttctgccacatacttccagtgttacactaaaatagaagcattcacaatgggcacaatatagttttgcattggtgtctgaatttgatggagcaaagacctattcaagttttcataaactgatttcagaaggtaaatatcttcttctgttggacccttagggtgatgagatgccctctgaatttgtagtgaagaagggttgtagcttggtcaccaggctgctgggtctgcattagggtccacctttagttggcttgttacaggggcttgggttgttataattcccattttatttttggacagactgaatatccttcagagctttgctccataaggcagacactagggcatgtttttgcaattggctctgcatatggtgggccttgtatcaggatgtggatgggtgtggctttcagtgagtaccagagagcatttcctcaggtaaccgtgtgggttactatataggcagaactgaccataaactgtggctcaggtaactgaaactgagtcatggaactgcctcagtgaccccagtaaaggccaaggtctgcatgcctggatgcatgactgtaaatgggcaccttcctccaagtctctggaatagcaggacctctgtcagactgtggctgggaggagtttgggatggttacagagtaagtttagaattctcaatggaaccaagttgggtgaaccctatcctggtctgtagctaaaacaggggtcctgtagtatcccacgtgagtgagggcctgccttctgaatagaacacttctcaaacataagctttaacagcatttcacaactgcatccctggatgtcaaatctctcttagaggtacttattttggagatggtgtcttgctacataacccaggctggtctcaaaatcctggcctgaactagttctccaaccttaacgtaccatgtagctgtcattacaggtgtaagccataatcctggttctctcataaaggcatttttgtcaggggtggctgactttttatgccataagggaatatgaaaatagggcacttttaatcttttcatcttactgatgtcactgtccttttacatttttactttttattttctatttcaaatttgtctataattttggattcagtcatttagcacatatgctagaatttgcatggtatacctgaagtaaatgagatattagtaggcaccccatatttactaaaatagttacttataaatttatgtttgctccgggcaaaaaggaattataggattttcgtctactattttcagcctatatctaaataataacatagttcatttcctaatatttgttttacatatcagaggatctaaccctattctacaaaatatatatatatttttctatatttaacaatggaaggttattatttgcttttaaagttggaatacagcagtttcattttgtgtaagaatagcatatatttaaaacaaaaagcaactctagtttcttttaaatgctaatttattaaaagtttgtcattggagtcttctatttataattatactgcatattttctgaaattttagtgccacacagtgcatgccaatgattcaaaatacaggtatatgatgattacatagtagcagttgaatatcacagttacctacacaatttttttttttttttttttttttttgagaaagagttacctctcttacccaggctggagtgcaatagtgtgatcttggctcactgcaaccttcatctcctgggttcaagcaattctcatgcctcagcctcccaagtagctgggattacagggatgtgccactatgcctggctaatttttgtatttttagtagattttgggtttcaccacattggctaggctgcttttaaactcctcacctcaggtaatctgcccccctctgcctcccaaagtgctgagattacaggcatgagccactgcacctgcctgacaatttttttttgatgatacatcaatgtggcataccagattttgtgagtaaatatttctcttattattgttttgaagttctgtgtatcaggggtcccgcccccaatatttcaatgtatgttctttctattttccataagtgtcagctggttgaaaaataaagagaaagagtacaaagagaggaattttacagctgggccaccaggggtgatatcacatatcggtaggaccacgatgcccacctgaaccttaaaaccagcaagtttttattaaggattttaaaaggggagggagtgtatgaacagggagtaggtcacgtgcttcaaggggcaaaaagcagaacaaagatcacatgcttctaaaacaggaccagagcaaaatcagaactcctgataagggtctatgttcagcagtgcacgtattgtcttaataaacatcttaacagaaaaaaagggttcgagagcagagaactggtctgaccaaaaatttaccagggtgtagtttcccaatcctagtaatcctgagggtactgcgggagaccagggcatatctcagtcattatctcaaccacataggacagacattcccagagtggccattcatagacctccccccaggaatgaattcctttcccagagtattaatatcagtattccttgctaggaaaagaatttagtgatatcttccctacttgcacacccatttataggctctctgcaagaagaaaaatatggctctttttgcccaaccccacaggcagtcagaccttatggttgtcttcccttgttccctaaaaatcgctgttattctgttttcaaggtgcactgattgcatattgttcaaacatacatgttttacaatcaatttgtacagttaacacaattatcatactggtcctgaggtgatgtacatcctcagctaatgaagataacaggattaagagattaaaataaagacaggcataagaaattatgaacatattatttgggaagtgatagatgtccatattaaaatgaaatcttcacaatttatgttcctctgctgcgactccagctggtccctctgtttggcatccctgacttcccacaatatctctccctttctttttatataaatgtaccaacatcgcatgcaatgttcaagagtcactagctgatctccaagccaaagtatagattgtcttaaatcattaatttgattagataatttttgatcaatgccttgttgagaattccacatttggttggaatttgcttgccaaagattaacaaaatgggccgtttgaatagattggtgtaatgccactccggcagtagtggccagtgcagtgactataaataggcccatgatcacagtgattaaagtgaaaacaaatctcttagattttttgagaattctttgtaacacttcattcattaaatgtactgagagggaagattcccagtgtctgggtaaagttaccgaatccagattccttctcgagctcgaagccacattacacttctcctggagtcaaaatgggagttaacacaagtgtataaatgacaattaatgcattggacagtttgtgtgtccaaattttgatatttcccactaacagcacgtaaggaggcttaacacaactttgtataggaatagtcaggctggaggtaaacaaagcagaacattgatactgagggagagtagaggtggtggcaacgcccaatgttgtctgccataaagaagcaatccgaggtgcccagggatgctgaggaagtagaggggcatacctgggtcaagaagaattatcataatgccaattggagtcccataaaggaggatcagcatcaaaaagaggaaaagggttcaaaggggatttatcatggggttcagagtcatggatgcaaggggcagtagtggggataacagacagaaaagtttacccttcccatactcacagtccagacatggcaatagccaatttccaaagttctgagtgttccaggctcagaatggggaatatcatatgaggcctcggaggggtaatgcccttatcttcccattttaagggaaagaatgagctgaacttcctatgtaaagtagaacgatgatcctcgtcctcccaataagaaataaaataagtagcctccaggcattcccttccaccagaggagcaattgttttttaaatagccctttggtgcccatcctattactaaaccatatgcgtcattttttagtactactacatgtgagttaacacagtcttcccaaattaaaattttagatgggccctcaaaatttttaggacatggttttcctacaggtttatattgaaagtttggggtatctcctattactccccctttcatttgtcttaaaggagaaagagagaggctggagatcaaatgtccctgttctcttgtagctaatctctccggaagataagcagcccagatttgagcttgtagatgaatacaaccatctacatgtgcatgtccaaggcacagaggagggtatttataacccatggtaacattaaattcagtgctttcttctcctggttgagtggggcaatggtcatctgtagctccatgtatccacacactatcattagtatagatttctgcaggagcattcatccaggtgagaggtcgaataagtggaagaaaaggcacataagcccaataagaataattttgtgtagcaggtaaatcattttgaggggaaactgatgagacagaaagtttaagaagaattattaaataaaacctattgtaagcaagatcctgtgctgaaggaggaagagaagaacagagggatgttattttcaggctaatagaaatggtgagatttttaggtttagaagtggcattaattagaggggtctccgttgccattagggaggattgaaccagacccattttgatttggcatgccagtttttgagaagtcggcagagatctcaccaggtatgaaggcggtctctgacttggatgtcttttccctgtggctttctttgtcactattcacacgaagtttgagtctctcagtgggcacccagacaggggattgatctcctggtgaaacacaagcataccctcttccccatgttataattgttccaggttcccaggtattggtttgggagtttttccgtaacactggcttgccttcatttagggagaattttttgcctgtataatggcattcagctgcagtcagagttgtctttaggaacatttagaaagtttaaagtaaacaatgctaaatgtaattgggagtggggagtggttaaattatgcttttgttgctcagactgtttggacaattgagtttttaaagtgcaattggcctgttccaccacagtctgtccctgaggattgtaagggattccggtagtatgggaaattccccttgttgcataaataaatcaaaagacttacatatccaggggtgttgtctgtttttatctgacatggaagccccataactacaaagcaagaatacttatgtcttttaacatgggcagtgccttcccctgtttggcaagtagcccagataaagcctgaaaagatgtctacagaaacatgcatatatgaaagtctgccaaaggagctaacatgagtcacatgcatttgccataagtcattaggagttaggcctctgggattaatgccagattcctgatttggaagtacaaaaacttggcactgagggcagcagtggataataagcttagcctctttccaggtgagagcaaatttatattttaatccagtagcattgacatgagtgagattatggaactctgagcttcttggtttgcaaaagagaccggtcaaccttttgattaccagcaggcatgggtcccagtaaagtggtatgagatctgatatgtgtagtatagaaagggtgtctacactggcgaaccacctgttgtaaacttgaaaataaaaaaagccaattcagaattatcaatatgtttgatagtagcgatttctatatttttagtggcatgtacaacataaacagaatcagagacaatatttaacagtttggggaaatcctgtaaggcaataattacagcaattaactctgccttttgagcagatgtgtgaggcgtagaaataagcttgtctgcaggacacagataaccagcatttccgttactggagccatcagtgaacactgtaacagcctcaggaatgggctgatctttggtctattgagggaccacccaataagtcatttttataaaatcaaacaatttttttgataatgattgacaataacacagataaaatcagtcaagtgaatttgccacagtatggaatgttgaaaagcagcctgaactttaagccgatttaaaggaaccacaatagatttggatcaaatccagaaattttaagtgatctacaccaagcttgtccaattagattggctatttggtccagataaacagacaaagtttttgacacagaatgaggaagaaaacaccactccactaaatcattatgttgaacaattagcccagtaggggagtgcaatgaagcaaaaaccagaagctgaaaaggctgagatggctgtaccctagacaacagggcagtttggattctttcttccatgaattaccgttccagtgaagcctcaggggtcaaagtcctgagactgtggagattggaatctccacacagtatagaaaacaagttagacagtgcatattttggaatgcctaaggtagatcttaaataattaatgttacccaaaagtttttggaaatcatttaaggttttcaaagaatctctcttaatctgaactttttgaggttgaatatattctttattgaccaccattcctaaatattgagcaggagtggtcttttgaattttatcttgagtgatgtgtaatccagcctcagtgacatggtggctcaaaaattgataacagtcaattaattctttatcagtgggggcagcaattaatatatcatcaatataatgaagaatataggcctggggaaattgagctcacactggtgaaagcacccatccaacataaagctggcagatggtagggctattcagcattccctgaggaagtactctccattgataatgagctacaggctcctgattattgatagatggtacagtaaaggcaaatttttcacaatccaatttatgtaaagcaataaaaatactttaagatcaataactatgagaggaaattcttaggtattaaagcaggggcaggcatgccaggttggatggctcccataggtttaattacagcattaatggaccttaaatcagttaccatccaccacttgcctgatttcttttttactagaaacacaggagaactccagggggaaagagaagattccacatttccaagttgtaactgttcagaaaccaattgagttgaagcctccagttttttttagagagtggccactgatcaatccaaacaggtgttttagattttcattgtaaaggaataggattaggaggcatggcagtggccgccattaaaaaggagaacctaaaccagcgctgtcttcttttacagtaacttgaagaggtttagcaattccttcatgttttggactgaaaccgagtctgggaacaaaccccatgttttccattatatgttgactgggagcactataagagttatgctgaatattaatttcagctcccccttgtgccaacaaatctctaccccaaagattaatggggattggcatgatataaggctgaattgcacccttttgaccatcagggccaatgcaaggcaagataaatgtgctctggtgaacttcatcagcttttccaacacctactagtcccatgttagtgggatgtttaagtcaagaggaaggccataaattagaggaaatattagaaatgtcagccccagtatctactaggccctcaaacttttttccttgaaggcgtatggtgcaggtgggccattgtttagaaattacgttaatcaaataagtggctttttcaccaccagagcccatcccagggccccgtgtcttatctcctttgtttaaacaatattaggtagtgaaagtaattgagcaattgactcactggccggaatggaaacaggaaccttggcagacaccataagtttaatctcatcagaggaatcagaattaatgagacaagtatgaactatgatacctttagcagaggtggataccctacatcctacataacaccaggcccaccgaaccttgagataaagggccagtgacccctctggggacaattaaaggcaaagaattaggtagtaaatttagaggaatggtaatacagagatcgacccccctgacccctactgtggaggtagacaagcactgtactgagatagaagaagaggatgggacccatctgggttggctgtaggtaaatttgtttgtgctgggggctacgttgggaccacttgaagtggaaatgcaacattggtctgagtctgaggtgtcccatttgatattggggtctgggactggccccacttcccatttccctggttctgtggcaagggatttgcatctatatcagacttagaggggcaagtacttgcccagtgtttatctttagacaacatgggcaaacagtagtaggagaatttgactgtgtttgttgagccagcttggctgcttttaagtttttaacaggctccaagaaaagaataagttgagacagtttgactgccatccttcatggcctgtgcccacagaatagctttgtgggtctctgatccaatgccttcccaagctttaatatatgcaggcaacacctcatgatcaggaaaattttgtctttggatggaacacatggcaattttacattcatggttcacattctcaaaagctaacatatgaaggagaataccttgagcatgctcatgagagacagatttttcaacagcatcttgtaatttagccaaaaaaatgagggtataattctgaccttgtttaacactagtaaatgaaacaggagcttggcctggggtgtgtaatttatcccaaactctcatacacaacttcgttacttgttccatggtgagagcatcaaagcctaattgaacgctagtgtcagagtaattatcagagcctgtgagctgagcctgagtaattagaatgccatcagcccaatttagttgagcctgcagacgggcctcctctgaccaccaggtacagaattgtaaatgctgagatgcagttagaacagcttttgccaaaaagtcccagtctaaaagaagcaaaatgacctcagtacaaagagtctgtaataccattttaacatatggagaactaggaccatactgaataaagagatccttgaattcttttaaaaaggtaagattgagcagtgcataccaaagcacttgtaccccttgagcatcaggaggttccagcatgaccggataagcctacatctctaatccacttgtttctttgttctggtgtaataagtgttgcattaaagtttcaagaacaggcacatgagacggagttggcatagaagtgacaggaaaagtatgtgcagataagagaaactgaggttgaggaggtcagactggtatgagagtgtgagaaaggggcattgggggagcacaagaggcagaagcatactggtgattattgtcccagtcctgtgcaactagagtggcaggagtgtccttgcatgaagaagcgtatagagaagcaggctgagtggatggcaaagtgactgattgagggaccaaaatgacaggagggtgaggagctgtggtggatgggggagggcctacagaattacaggtaaattatagtttggtcctggagccattaggggtctccggaggcaaagcctgcaaacgtttgaagagggaagagttagcatagatatggtcctggctgtccaagttggggccacgggagctacaagtaccggctcttcatgaaaagaaataagatcatcaggggagatgttaagccaaagtcactggagttagatattgaattctcaacattgtcaggtcagggaggagtaggcaaagggagaggctgagcagataatgaaggccgagtgggagaggaaagctgaggaagaggtagagggttgccagatttagaaaattgtggtaactgcaggggacacgggattggtatgtcattaggacaccaggtaccaagtcccaatcaccccaaacagtgatggcaacataatttcctgtcaggaccagttcccagaattttgcaccaacatgatcccatagttccacatctaacgttcccttttcaggaaaccaaggacagtattcttccactgccctgaatagggtgaccatattttccttgggcaccagaactccaccaagttttaacaggagtttaatatagcagagataagcaaaatgtttagactccatgtgacccatagttaccgcagacaatacacagacaactcaccaatcgtcagggagtcaaacaagcatttctgtggactggaccaatgaacattcctccacacctaccaaagggaatcaggttcccacatgcacttaggaaaaagaaaacaacattggcacaccagttattggggaaaaccacccccaatacttcaacatatgttctttctattttccataagtgtcggccggctgagaaataaagagaaagagtacaaagagaggaattttacagctgggacaccaggggtgacatcatatatcagtaggaccgtgatgcccacctgagccttaaaaccagcaagtttttattaaggattttaaaaggagagggggtgtatgaacagggagtaggtcgcatgcttcaaggggcaaaaagcagaacaaagatcacatgtttctaagggaacaggacaagggcaaaatcagaactcctgataagggtctatgttctgtagtgcatgtattttcttgataaacatcttaacagaaaacaggatttgagagcagagaaccggtctgaccaaaaatttaccagggtgtagtttcccaatcctagtaatcctgagggtactgtgggagatcagagcatatctcagtccttatctcaactgcataggacagacattcccaaagaggccatttatagacctccccccaggaatgaattcctttcccagagtattaatatcagtattccttgctaggaaaagaatttagtgatatcttccctacttgcacatccgtttataggctctctgcaagaagaaaaatatggctctttttgcccaaccccacaggcagtcagaccttatggttgtctttccttgttccctaaaaaccacgttattctgttctttttcaaggtgcactgattgcatattgttcaaacacacatgttttacaatcaatttgtactgttaacacaattatcatactggtcctggggtgatgtacagcctcagctaatgaagataacaggattaagagattaaaataaagctaggcataagaaattatggaggtattatttgggaagtgataaatgtccatattaaaatgaaatcttcacagtttatgttcctgtgctgcaactccagccggtccctccatttggggtccctgacttcccccaacgctatgttagtgagttttttcagggtaggttacttttttttttgttttgagataaagtctcgctctgtcacccaggctaaagtttactggcacaatctcaaatcactgcaacctctgccttccgagttcaacccattcttctgcctcagcctccaaagtagctgagaatacagatgcatgcaagcccagctaatttgtgcattattattgtagcaggacaagctgcagacaaaacccttcagacaccaagttagagaagaaagggctttattcggccaggagctttggcaagactcacgtctccaacaactgagctccccaagtgaggaattcctgtcccttttaagggcttgcaactctaatggggtccatgtgagagggctgtgatcaattgagcaagcaggggtatgtgactggaggctgcatgcactggtgattagaatggaacagaataggacagggatcttcacagtgcttttcttgtacaaataactgattaggtcagggttgtctgcttatggatttcatttctgctttttagtttttactgctttctttggaggcagaaattgggcataagacaatatgaggggtggtctcctccctattccccccctttgagaatctcagtagtgggagttctcactttcattctggctacccgtgtcttcttacaaggcagatcgatagtgattcaaatagtacacttgtgctgaaacattttggtgaactaaggtagcagtgaagctttttatcatttgaaaaagtacaggtagcaaacaagggagcagtaagcaggttcctattactattataactcttattataacagttttaaatgctcctagcactggaaaccattttctaaacttggcaccaggatcaaatccatgccacatttgcacaggcacatgtgccagttttgtcatatctctaactatgtcttcaattacttgcccttggtcatctatgtgtagacctcaattagtaaggttaaatttcccacagacccctccttcagctgctagtaagtagtcgagagccaatctatcttgataggtaggatttctcatctgagtttcttgccaggccagaatagtcaaggctctgccagttttattagtggttatttctaagacagcttgtaaccatatcatttggttgagcatgtaaatggggttgtagtatccccacgagccgtattgtgcccaagtagcaggcccataatattgtgtgattctctcagggagccattcatcatcttgccaattccctatggctatgcttctcttttcatgagaagcatagacagggaagccaggagttcacctgtctttatgggcaataggaagaaagattgtttaatagtgccaataacacaactacctgcccactggttgggtaatttggcataagctctatgcccacatatccagtataatccagtgggggctgtccagtcctggtgggactctgggtgggtctacacggtttgcaactttgggaatttactaaatggattcctttctgtgtgatttgaactgtaccaagtgactgtttttgtggtaccattatacaatttatgtcccagacaaataagttgtcctatgggatgagtgaattattttccttctctagctatgcaatattgtccaataattgaggcttttagggcccagaaattatcagggtgattcttttgagccaggaattcaacaggaactgggtctataggtactaatccttgggcttcccatggccaatgatctcccattacagttcctccacacacataacatgaagtgttattgagagactgggctatgtgctcagataattgcaaaaacaaatttcttgtttttctgggaatttttggtactggtacatttagttcatcataggaagtttgaaacactgtctcaggagagcgtttgtaaacttctcctcaaactaagatatttacttgaggatcccatccagacccgtcaattcctaaggtcacacactcctcttttttccagtgaggatcaaggggatttgttattactagctctgtggggttacattttcccttaatacaggaaaggctattttttccttcctgaaagtggactggatccttttcattttttatccaagttgcccaagtgacacaagaccaatatccacattcattgccacacaatcctaattcatgacaaatgtactttttttcagtcatatagcctttttcccaactaaaagagcgaccttgccttcctaacttattgctattaatgacagcactggcatcaaatctcaagattatgcgtttgggcacccctttttattctgttgtggtcaatactttacttgtatcatttatgagtccccaccagacttcagtccttaatctttgttaaaaaactgtggacatgggaggctcagaacggtcataacacacatctggccagtcttttcctgggctacataccttgtactgagtgccattatataagcatgttccttttaaagtccctagacattcatagtaactatagaacagaaagattgttttaacttgttgccctacctcggtaacctgatgtatacactgagagcagtcctccatgtggggaaaatcagtggaagtttttactatacaagcccaaattataaggaagatgagtcccacgatgatcctcctcatgctttggccgtgcatagaccagtcagcttctgggtgtgactggagcagggcttgtcgtcctcctcagagtcactttgtagggggtgtccgggctcggttttgcctcccaggtttcagcggctgcaggtttcacacagctgtggtggatccaggctgggattccttctacctttacagctgtgggggtggtcaggatgacggtctgaggtcctttccaccgtggcctcaaaggggctatgttgcagtctttgatccaaatgcaatcacctggagagaaaaggtgaactggggagaataagctgatgggacatctctcatttacccaagttgagattgtttgtgtaatttttcctaaagcctgtagctgtcactgtaattcaatttcacctaactctcagggaatgcctggaagcccccatagtataggaggaggtctatgatacagtatttcataaggggagtatcctgttttcttagaaggagtgcatctaattttaaacaataccataggaagggcctgtatccactttaatcctgcttcctgacatactttccctaaactatttttaatagtccgaatcattggctcgacctttccggaactctgaggtcggtaggtggcatgtagcttccaagtgattcctaatgcctttgctgtcttctgtaccaagtcagccacaaacactggcccattatctgagccgattcataagggcagtccaaacctaggaataagatctcagagaagcacacaggttaccttgggggccttttcagttctttttggataagcctccacccacccagagtaagtacacacaggaaccagcaaatacttgttacctgcacatttctgtgaaatccacctgaggatcctgaaaaggagctgctacataagcttgtatgccaggcagaacagtgagacattgcctcatattgtgctgtcggcaagtaacgcactgtttggtactgctttggcaagggctgggaagcgtgagatgtagaagtaccagcctaacaatttttcaaatgactcttgacctagatgagtggtttcatgcatggccaatacaattgtggctcccagcaactgcagcacagctactctcccatctggcagtctgatccatcctccttttattacttgcccccttctgtgtggaagaagtctttttctttcttaggtaggtaccaggtcaggtatttgagggagtaagggggctgctactgatgcctagtatggggtagatgctgcttttcgagcttctgagtcagctcgggagtttcctaaggccactgaggtggagcctcactggtattccctgcagtgcatgactgccaccttctgaggtttccacactgcctccaataattgtagaatttcttgttgatattttatgtcctttcccccagagtttaacaggcccttttccttatataatgctccatgcacttggagggttagaaaggcatgtctagagtcaatgtagatatttacagtcttaccttcactgagttctagagctcgagttaaagcagtgagctcagccttctgggctgaagtgccctgtggcaatggtttggtttcaatgacagcatccaaagttaccaccgcatattctgcacatctttctccttgtgggttgatgaagctactcccgtccaaatataactccaagtctactgatgcccatggctggtccctaaggtcaggtctgctagaataaactgagtccaacacctctacacagttatgctcgactgggctctctgatactgggagcagggtggtgggatttagggtgttacagacttcaatgtttatgtggggattttcacatagcaagctttggtacttggttaatctagcatttgttagccaatggtgtcctttggtgttcatcaaagttaccacagcatgggggcttttatattcagatttggcccaagggttagtttatctgcttcttgtgctaacagggctgttgctgccagggcccttacacatggtggccagcctttggagaccccatctagttgttttgagagataggccactggccttggccaggaccccacagtctgggttaaaactccaactgccattgtttctctttctgacacatagagtgcaaaaggctttgtcaaatctggtagtcccagggctgggaccaatgtaagtttttcctttaacttacaaaaggcttgctgttgtagaggcccccattcaaaaggctcccagttgcccccctttgtaatgccgtacaaaggtttggctagcactgcaaagtttggaatccataatgtgcaaaaccccacagctcccaggaattcccttacttgccttctggttttaggttccggtaggctgcagatgacctgctttctttctgaccacaggctgtgctcccctttccaaatagtgaatcccaggtagcgtacctgctgtctgcagatctgagatttcttcttgggcaccttatacccacagtcctccaggtgctgaaacagggcatcaacccttttgagcacccaactgccatggagtgtcccagcagaaggtcatccacgtacaggagcaagacatagcttaggtctttagcaggaaacttttgcaagtctcaagtcagagcctccccgaagatagtaagggagttcttgaacccttggggaagccagttccaagtgtactgagtagtgacacctgactgtagatcttcccaccgaaacgcaaacagcttctggctctcaggagctattctgatgctacagatggcatcttttaagtccagatgggtaaaccagatgtcctcagccggcagcagccctaacaacgtgtaagggttaggaactgttgggtgcagagtcactgtagcttggttgaccaagcgcaagtcctgtactggttggtagtccttggtccctggcttagggactggcaggaggggggtgttccatggacactggcaaagaactataattccataggctttgaagcacctgagatgaacccggattccttcgagagcttccctgggaagggatactgctttcatctaatcagttgggcccaggcttaacttctatgagtatgggggcttggttggccgccagtcctggaggattatcctctgtccattctcaagaccaacgctcagctagagctggttgtatctcttcccattcttcttcccaggggactgtaaggacaatgataactcctgttcccagtaactttagctgtaaagagccgtgttttgtaaaggagatggtggctgtcagcttgctaagcaagtctcttcccagcaagggcaaggaacagccaggcatgtacaagaactggtgaactacttcatgtcttgccaccgagtaggtccgtggcagacagtaagtctacttagtagaaactcctgttgctcggattatatcaatggttttcttggacaagggggtgaccggggtggtcaataccaaatgttcaacacctgtatcaaccaaaaacttaatatctttgcccccaattgtaatcctgaccgtgggctccttgggggtgattgagcccagtccccttcagtccaatagcccttcagccagattgaataaagctccctcatctttatctgaggtcttttgttctgaatcatgttgcttttccttcagttggggacacttatttttccaatgtcccattttcttacaataggcgcattggttacattgcaagcgtgggtgattagacagggtattattcccagaacccccctttccctctccttttgggggaattcccctgatggccacagccagtaagttggcgtttcgcctggcctggctttcaccttccttacggctttctctgtggcttgttgcatctctattcaaacacttgattggctatttccagtaactgtgagatattcatacacttaagcccagcctgtttctgcagttttctcctgatatcttccacgctttgactaactaaggccatgttgatcatgtgctgattttcagggctatctggatcaaaatgagtgtacatactgtaagcctcacaccgtctttcatagaattgcgctggactctcctctttttcttggatgacctcagagatcttatttacacttgtagccttttaagcccctttctttagaccttctattcatgcatcatggtactgtcttagcctctccatgtctggtcactagttcaggtcccattgggggtctgttcctggcagctgaattcttatatattcttggggattttggtaatccactgggatgtgctcctctggccacttagttgccacccggagcacccttagcctttcatcaaagaggtacatgaacagctggtggcaatcagcccaagtaggattatgagtgtgtataatagtttggagcaagtcaattaaagcttgaggcttttcagtgtaagcagcagtattatttttccaattgatgaggtcagcagaggtgaaaggttgatacacaaagtcacgcctttccaccatgtgtccatcctcatctaccccagtatatcactgctgtctcaggggcatttggattccagtcttgggccgtaagtgagctgccaagggaggagtttctcccgtggcttcacttcctcttttgtctactctgggtggtctaggagtgtggctatctggtggaggtgtgggtgctgtgggctcaggagtgggaagcccttcctcttgcaattctgaccatgattcttctggtattgggtcagacagggcttttggtgccggcttccctcagcaggtggagtgagaaccttccttaactaactgtccctttgctactagtactgctgctgcctgtcctcttaactactgtggggggtccaaaactagctctaaccgagaatctttatacaggaactgatcggggtgccctggcttgtaggttacactgtgccataccttcaatacaagggacctgttcaggcttccttctgatggccaacccacctttaatgctggccagtctaactcacacaaagttctaagttttcttggtgtcatagtaactccatagtctcccttaaatccctttttgaaatttttcaacatagctcctagtggggtgggcctactttgtgcctgacccatgtttcctcgagacaaaacactgcgcttacaccacatgcacaccacaaaacaaaaacaggtaaaaagggcacacacacactttttcagtttacaccaaaccagaatcagaaccaaaatcagagtatcaagaaatccaagccaggtcaaaaccaaaacctaagtatcaagcaattcaactcaactcaaaaacaaaaaacctaagtgctggtatgggcacgtcatgggtgatcaggccacgcttccactcaaatggagtaggcaagttccaaagactagtcttaccaagtttcagatgtctggattccaagtgccagttccttcctgatgttcagccactgcagtgatcctccatgggggcctgccacacactgctctggtgaggcattccactggcgcagttgcctacccgggagcactctcaggatccgcgttgctcaagctggccagagtcccctgcagggatgcttcacagggcaggcctaagctgcctaagtggctgtctcaatggtcctttaatcacctgcttcccagtcagggaaccaagaaatgtagcaggacaagctgcagacaaaacccctcagacaccaagttaaagaaggaagggctttattaggccgggagctttggcaagactcacatctccaacaaccaagctccccaagtgagcaattcctgtcccttttaaggggtcacaactctaagggggtctgcatgagagggtcatgatcaattgaacaagcagggggtacatgactgggggctgcatgcactggtaattagaacagaacagaacaagacagggatcttcacagtgcttttcttatacaaataaccaattaggtcaggggtcgatctttaactaccaggcccaggttttggtgccaggctgtctgcttgtggatttcatttctgccttttagtttttacttcttctttctttggaagcagaaattgggcataagataatatgaggggtggtctcctcccttattattagagaccacatttcaccatattggccaggctggtcttgaactcctgtcctcggtgatctgcctgccttggcctcctaaagtgctgggagcacagtcttaagccaccgagcccagcctcagtgtaggtttcttaacatcagtttattgtgtttattgggtttacttacgtattataaatttagacaattttcaattctgcttgtactctttaagtcaacttgagtttcaactgaaaaataaataatgcatgtgtatcccaatcagattacatgtgtatgcattgtcacacatgtccatgtgaagagaccaccatacaggctttgtgtgagcaataaagctttttaatcacctgggtgcaggctggctgagtccgaaaagagagtcagcaaagggagataggggtggggccattttgtaggatttgggtaggtaatggaaaattacagtcaaagggggttgttctctggtgggcaggggtgggggtcacaaggtgctcagtgggggagctgctgagccaggagaaggaatttcacaaggtaatctcattagttaaggcagaaacaggccattttcacttcttttgtgattcttcagttacttcaggccatctgggtgtatatgtgcaggtcacagggtatatgatcgcttagcttcagctcagaggcctgagattcttgtcttcttatattaataagaaaaataacataaaatagtgttgaagtgttggggcagtgaaaattttggtggggtggtatggagagataatgggggatgtttctcagggccgcttcaagcaggattaggggtggcgtgggaacctagagtgggagatattaagctgaaagaagattttgtagtaagggcaatattgtggggctattaaaaagagcatttgtcatatagaatgattggtgatggcctggatgcagttttgtatgaattgagaaactaaaccaaagacacaaggtctgaataagagaaggagcaaaacaggtattaaaggactaagaattgggaggacccaggacatccaattagagagggtccaagggggttcagagtaattacttgtttggttggtgagttttggggctctattcttgacagagtcctttttgttaagttggaggctgagcttgctgaggtatgttctgaaaagaccattaatccattctacctttcctgaagattgaggacagtaaggggtatgaggtttcaatgaataccaagagcctgagaaactgcttgggtgatttgactagtaaaggctagtccattattagactgtatagaggtgggaaggccaaactgaggaattatgtctgacagaagggaagaaataacaatggtggccttctcagaccctgtcgggaaggcctctacccatccagtgaaagtgtccacccataccaaggagtgttttcatttcctgactcggggcatgtgagtaaagtcactttgccagtcctgggcaggggtaaatccccgagcttgatgtgtagggaagggagtgggcttgaataatccctgaggagtagtagaatagtagatggaacactgagaagtgatttccttggggatagatttccatgatggaaaggaaatgagaggttctaagaggcagtctagtggcttgtaacctacatggaagaagttatgaaatgactacagaatggaatgggtctgtgaggctggaatgagatattttccttggtccaagaatcatttgccttgtgtgggaagagattgataggtgaaagtttcagtgggggagtaggtgggagtgaccagataagaaggagaaaaactgccatgagggatagaagttggaatgctagctgctttttagctaccttatcagcataagcattgtcctaagtgatgggatctgatgccttttgatggctggttttttagctaccttatcagcataagcattgtcttaagcgatggggtctgatgccttttggtggcctttgcagtgaatgactccatcttcctttggaagtaaagccgccttgacaagagtttttattaaagaggcattaataatggaggacacttgtatagtgagaaaacatttttcagcctatataacagcatgggggtgcaggatatggaaagcatgtttagagtcagtataaatattgatgcatagtccctttgcaagattgagggcctgagttaaggcaacaagtttggcttgctgagaggtagcacagaggggcagagcggtagcctcaatgatagacatggaagatactatagcatagcctgcctttgctggtgagtggcaattaggcctggtggaactgccatcaataaaccaagtgtgatcagggttaggaacaggaaagaaggaaatatgaggaaatggagtgaatgtcaggtggatcagagcgatacagtcatgtgggccagttgtggtatcaggaataatgtgggggccagcctaaaacagtaaggtcaagttgtttggacagaaaggctacacagtgcagtcccagctcttgtgtaagaattttgaccacacagccctgtacttcggctgcatgtaatgaaaagggttgcgatgagttaaggagagctagtgtgggagtagcttctagggctgcttttaaggaatggaaagaggagtggtgaaaggatttaggatctgtggggtcagctaggtttgctttttgagtttatacaatggtttagtcaggatggtaaaactagatatccaaaggcagaagtacctaaccatgactaggagggaaaggagttgttgttttctagaaggggttggggtttgggagattagctggacacaatcggtagggagagcacatgtgttttcatgaagaattatgccgagataggtaatggatgagaaagaaatttgggcttgactgaggtaatgggagctgtctgtgaagccttgcagcagtacagcccaggtaatttgctgagcctaatgggtgtcagcatcagtccaagtgaaagagaagagaggctgggatgaagggtgcgaagaaatagtaaagaaagcatgtttgagattcagaacagactaatgggttatggaggggttgtggagggaggtattgaggataggaaagtatatggttttgacaccaatgggtggataggcaagacaattggttgataaggtacagatcctgaaataacctgtaagtcttgtctgggttttggacaggtaaaatgggggaattgtaaggagagtttataggctttaaaaggccatgctgtaacaggcaggtgataacgggctttaatcctttggggtaagggtgattaggttttaatgggatggtaagaggtgcatgaattgtcaccaaggagggagtagaggtgtcctatacttgtggattaaaatggggagatacaaggggaggatgtgaaggaggctttgaactggggaaaaggatggcaatgaggtgtggctgtagcctaggaatagtcagggaagcagataatttagttaaaatgtcttgacctaataagggagctgggcaggtggggataactaaaaaggagtgcgtaaaagaatgtggtccaagctggcatcagagttggggagttttaagaggtttagaagcctggctgtcaatatccacaacagttatggaggcaagagaaacacgcccttgaaaagaaggtaatgtggggtgggtagcctccgtattgattaagaagggtatggactcactttccactgtaagagttacctaaagcatctgtgatggtccaggaggcttctgaggtgattaggcagtgtcagtcttcagccgctaagccaagaatatctgggaaggagtcagtcagagagccttgggctagagttccaggggctctaggagtggctgccaggcgagctggacagtctgattcccagtggggtcccgcacagatgggacatggcttaggaggaatcctgggctgcaggcattccttggcccagtggccagatttctggcacttgaagcaagatcctgagggaggcggtcctgtaggaatgcctgaccactgtggcttaggcattttgaagttcttgtgtgctggaggtgtggctgggttttgtctcatagcagaggcaagtaatttttactcttctctattattgtacaccttgaaggcaaggttaattaagtcctattgtggggtttgagggcaagaatctaatttttggagcttttctaatgttgggagtgggttgggtaataaaatacatattgagaataagacggccttctgccctttctgggtctagggcggtaaaccatctaaagttgttgccaaatgggccatgaactgggttgagtttctatatttgatgaaaaagagcctaaatgctaactgatttgggaaaggtcagataaagaaaaaggagtgttaaccttggctatggcttcagctccagccacctttttaagaggaaattgttgggcaagtgggagagggctagtcatggaatgaaactgtaagccagaccgggtgtgaggaggggaggtgataaaaggattatagggtgggggaacggaggctgatgaagaactgggacctggcttggcctggcgaggagcagcttggggaggagaggacaggtgggtctgtagaaaaggaagattgaaaagactcagtgatgcttggggttgggactgaagggacaggtgggagggaaagaaggaggatttgtgatgagtcgcattgggaacagagattagggagggaccaatgtgtaaaagaatgcctggacatcaggcatctcacaccatttgtcttttttgacaaaaatcatccaggtcttgtaaaatggaggaatcaaaagtgccattttctggctatttagaaccattatagagtttgtattggggccaagtggtgttgcagaagaaaataagatgcttaggttttaggtcaggtgagagttgaagaggttttaagtttttaagaacacaggctaagggagaagatgcaggaatggaggtcagaatgttgcccatagtgaaggatgtaagtttaaggagaaaggtagagacatggagaagagggtggtgagcagccctgggctgcaatatgggtgagcatccaaagcaggtgtccccgcaattaacttgccaccaagggaatgtgggtgaatgaccaaggcagatgtccccacggtgatcagacgccaatgaaatgtgggtgaataatcaggcaggcatccccacagtgattaaacaccaagggaaaactgtcttcctgagtctaagactggcaccggagttttgggtccacggataaaatgtgtctcctttgtctgtactagagaggaaaaagaactggagttggaaggacagggagattgaagggtagcaagagaggctggagaagagagtgaaaagaccgcttacccgatttgaaattggtgagatgttccttggactggttggtctgaggacccgaggtcataggtagatttcctcacggagtgagggcggggacaggcctcccgaaggattacctctgtcctgggtttttggcaccaaatgtcatgcgtgtccatgtgaagagcccaccaaacaggcttcgtgtgaacaataaagctttttaattacctgggtgcaggcaggctgagtccaaaaagagagcgaagggaaataggggtggggccattttataagatttgggtaggtaatggaaaattaccgtcaaagggggttgttctctggtgggcaggggcgggggtcacaagatgctcagtgggggagcttctgagccagaaggaatttcacaaggtaatgtcatcagttaaggcaggaacaggccattttcacttcttttgtgattcttcagttacttcaggccatctggatgtatacatgcaagtcacagtggatatgatcgcttagcttgggctcagaggcctgacatgcgtgtttatctataaatacgatgccaattttacttatggcttatctcatattctttgttagctgattttcgatggtagttttatcttgtctaagtgagtagtcgtggagatagtcattatcacgatgtgtttaatgatgaatatatattttctttttgtgagagaaacacttttgtgatttgaagttaatttttaaaaagatttaccattctgtatttttgtcagtttttccttgaaaacgttgttttaaaaacacataacataaaatttaccatcttaaatttattgaagtgtatatttcacagccagctgtggttgtggctctcatctgtaatcccagaattttgggaggtcaagacaggaggatatctggagctgaaaagtttgagaccagcctggggaatacatggagacccctctccataaaaaaaaacttaatagtagccaggtatggtggtgtgcagctgtggtcccagctacatgggagattgaggaggagtcaaaattgtgcctctacactccagcttgggtgacagagtgagaccctgtctcaaaaaaaaaaaaaaaaaaatgctgttcacttcaggcatgttaagtatattcacattgttgtgcaaaagatttctagaaactttacatattgcaaaactaaaactcagtaaccattaagtaacaacatctcattttaccctctctccagcttttggcagacaaaacttccactttttgtttttatgattttgactacttaagatatctcatataagtggaatcatacggtatccataattttgttactggattaattcaactgacataatattctcaatgttcatcttaaaatgtgacaagattgttctttttaaggtggaataatattccatcgcatgtatatgttacattttttgatacgtttataaatcaaggaacatctaggttgcttcagacttttggcttttgtgaatactggtataataaagatgaattttcaaatatgcctcccaggtccagtgttgcattttttttttttttttttttcccgcagacggagtattgctttgtcgcctaggctggagtgcagtggtgtgatcttggttaactgcaacttctgcctcctgggttcaatcgattctcctgcttcagcctttcgagtagctgggattatagatacccaccaccacacccagctaattttttgtacttttagtagagatggggccaggctggtctcaaactcctgacctcaggtgatctgccccctcagcctcctaaattactaggattataggcttgagccactgtgcctggccttcgttacatattttggatatagatttataaatgaggaacatttataatttttaaaataatggctgcatctttgttttccaccaacattcaatatggatttcatttttattgtatcatcaacagatttggtgttttaaaaaaatttatcatggccatattaatgggtatgaggtgattttgtttgtcattgtggtttttttttcatttctttacaaattagtaattttatgtgtcctttcaaatgctttttctcatttgtgtacttttctaatgaaaatgttgtttgtccgtttctaaatcaagttattcaaccttattttttagttttaagagttgtttatatattttgaatattaacttctttcatgtttaatttgcaaatgttttcacctattttctaagggatgtcattactcttgaattgttttttggtatgaagaaattttgaagcctattgtagttaaaacttttctgttatttcatttgctgctcatgtatttaattttgtatctaagaaaatggtgccaaggccaatgtcatgtctttttcctgtagtttttctaaaagatttgttagtttttttatgtctcagcattttatttaaaatatatttttgtatcattctaggaaataatccaacttaattttatcagtgctgatattcagttttcaacatcatttttttgaagagattatttctattttgtgctcatggcaacttcgtggaagatcatttgatcatatacagaaggattcatttctgagctctctattctgttctttcatctgttcatctttgtttctgtatcacattgtttatattctttagcttttaactgtaggttgtattgacatctttgaaaaataacattttttgacccctgagcaagaatatgttgatgaagagtgtgtttcatattcacaaggttttgaatttgccagtttgacttttgcttttaattcctagtttcattcagcttttgttggaaaacacacagtgtataattttagtgtttttaaagtgatttgttgttgttgttttgagacaagatcttactgtcaccaggctgcaatgctgtggcataactttggctcactgtagcctcagtctcctgggcttgaatgatgctttcacctcacttttctgagtggctaggactacagtcatgcactaccatgtctggctaattgtttgcttctttgtagtgttaggatctcactatgttgcccaggctggtctcatacttctggcaccaatggatcctcttaccttggtctctcaaagtgttaggattataggcaagagccactgcacccagtcagtattttaaaatttaataaaacttgctatgtgtcctaacggaatacaccagatgcaaatagaaatattgcatattatcttggttttgactggagagttttgtgtgtgtctgtgaagcctagttggtctataatatggtttggatgtccatgttctccaaacctcatgctgcaaaataaatcctcaatgttggttgtgagacctggtgggacatgtttttgtatgagggcatatttctcatgaatggcttggtacatcctcttggtaaacaaaaagtttacactccattaattcaaatgagagctggttcattaaaagaacctggcttcttcacctcacacttgctctgtctcttaccatataatatgtccagttactttttaccttctaccatgattttaagcttcttgatatcctcaccagaagcagatgctgacacacacttcttatacagtctgccaaactgtgagccaaataaacattttcctttataaattatgcactcccatgtgttcctctatatgcaaaataactaatatagtctataatgttgtctcagttttctgtttcttattttttatctgaattctctatttatttcttcaaatggggccttgatgtctgcaattattatgtcgctatgtatgtcttgcttcacttttgtcaatatttgctttatatattttaaagcccttatgttatttacacatatacatatagatagataaatactataaattcctgctaaatcaactcactttaccataatataatatcaatcattgtctcatggtagtacttaaagcatattctgcccaatataattatgaccacctcactcacttgtggttactatattcatggaatatacatttttttattctgttactttcagcctatttgactcaatgattaaattagtctcttgtaggcagcatactgtatgctttataaaaaaccactcaggcattctatatctttttctttatataattttatatatatatatatacacacacacacatatatatatatacacaagtgtatgtatatatatatatgtgtgtgtgtatgtatatttttttccagatggagtttcactcttgttgcttagactggagtgcaatggtgtgaccccagttcactgcaacctctgcctctcaggttcaagcaattttcctgcctcagcctcccaagtaggtgggagtacaggcgcctgcaaccacacccaggtaattttttctattttaagtagaaatggggtttgaccatgatggccaggctggtcttgaattcctgatctcaggtggtctacctgcctcggcatcacaaagtgctggtattacaggcatgagccaccacatccagccttgtgtattttggagatagtgtctcactctgtcaaccaggctgatttgctcggttcactgctgcctgaatctcccaaactcagatgatcctctcatatcagcctctcaagtagctgcattacaagtatgtaacatcacacccagccaacttttttttttgtattctttgtcgagacagattattgccatgttgccgattctggtcttgaactcctgggatcaagtgatcagcctatcttggccttccaaagtcctgagattatatttcattttattaagtagtttaatacgtttaaatttaaaatgattccttaaagaaatgaagttgttatttccagatatattgttattgtttcatgtgtttctagtagtatatttttctcatttccttttttactctctttaattttgtactggcatgctttgattattttttgttttattttagatactttctttaaacagaatctttgcaatcatcttgaaaactgtagattacatacatcttacagttaaagcaatatattttaatctcatgacaacttcaattgaatacaaaaactgtgcctctatattttccagtttgttgttgatttttttttattaaaatgtgcatcattcttttatttttatttatttattttttattgatcattcttgggtgtttctcgcagagggggatttggcagggtcataggacaacagcggagggaaggtcagcaaacaaacaagtgaacaaaggtctctggttttcctaggcagagtgtttgtgtccctgggtacttgagattggggagtggtgatgactctcaacgagcatgctgccttcaagcatctgtttaacaaagcacatcttgcaccgcccttaatccatttaaccctgagtggacacagcacatgtttcagagagcacagggttggggttaaggtcatagatcaacaggatcccaaggcagaagaacttttcttagtacagaacaaaatgaaatgtctcccatgtctactactttctacacagacacagcaaccatccgatttctcaatcttttccccaccttgcccccttttctattccacaaaaccgccgttgtcatcatggcccgttctcaatgagctgttgggtacctcctcccagacggggtggtggccgggcagaggggctcctcacttcccagtaggggcggctgggcagaggcgcccctcacctcctggacagggcagctggccaggcggggggctgagccccccacctccctcccggacggggcggctggccgggccgggggctgagccccccacctccctcccggatggggcggctggccgggcgggagggctgagcccccccacctccctcccagacggggcggctggccgggcggggggctgaccccccccacctccctcccggacggggcggctggccgggcagaggggctcctcacttcccagtaggggcggccgggcagaggcacccctcacctcccggatggggcagctgaccgggcggggggctgacccccccacctccctcccagacagggcggctggccgggcagggggctgacccccccacctccctcccggacggggcggctggccgggcggggggctgacccccccacctccctcccggacgtggcggctggccgggcggggggctgacccccccacctccctcccggacggggcggctggccgggcagaggggctcctcacttcccagtaggggcagccgggcagaggcgcccctcacctcctggacggggcggctggccgggcggggggctgagccccccacctccctcccggatggggcagctggccgggcggggggctgaccccccacctccctcccggacggggcagctggccgggcggggggctgaccccccacctccctcccggacggggcgactggcctgacgggggctgaccccccacctccctcctgggcggggtggctgccgggcggagacgctcctcacttcccagatggggtggcagccgggtggaggggctcctcacttctcagatggggcggttgccaggcggagggtctcctcacttctcagatggggcggccgggcagagacgctcctcacctcccagacggggtcgtggccgggccgaggtgctcctcacatcccagacggggcggcggggcagaggcgctccccacatctcagacgatgggcagccgggcagagatgctcctcacttcctagatgggatggcggccgggcagagaccctcctcactttccagactgggcagccaggcagaggggctcctcacatcccagatgatgggcggccaggcagagatgctcctcacttcccagacggggtggcggccgggcagaggctgcaatctctgcactttggggggccaaggcaggcggctgggaggtggaggttgtagcgagccgagatcacaccactgcactccagcctgggcaccattgagcactgagttaacgagactccgtctgcaatcctggcacctcaggatgctgaggctggcggatcactcgcggttaggagctggagactagcccggccaacacagcaaaaccccgtctccaccaaaaaaatacgaaaaccagtcaggcgtggcggcgcgcgcctgcaatcgcaggcactcggcaggctgaggcaggagaatcaggcagggaggttgcagtgagccgagatggcagcagcacagtccagctttggcttggcatgagagggagaccgtggaaaggggaggagagaggggagaggggagacgggagaggggagaggggaggggagaggggaggggagccggagtcactcttgttcgaacgcctccaacactatgactaagtaaaggagaatttctgttgttgattttaaaattattctatatggtgtatctattaacatttatgcggatttccatatttttatattctataaaagtactttaaaggttttgtgtaccatcattttgttagtttgttttgttttgttttgaatcgagtcttgccctattgcttaggacggagtgtatagatgtgatcttagctcactgaaacctcggcctcccaggttcaacaattatcctgcctctgcctccctagtagctgggattacagatgcctgccaccaagcctggctaatttcttgtattttttagtaaagataggctttcactatgttggacaggctggtcttgaactgctgacctcaggtgatccacctgcctcagcctctcaaagtgctgggcttacaggtgtgagccacagcacccagctggaaattactttttatctcactattcatagcatttcatatcaatacaaagattgacacatctagatataaatatacatagggagataaatactcacatagagaattctataaatatttctatctaaacatttatgtatacaaaacatgttccccaaaagacatttttaatcttttagcatgcactgaagatgctgatgtagaattacttcttttttcttttgctaaataacatgtcagaatggaacatagttatacaattttgtttatgtaaatatcaacaaagctctatcttcaaaggcaggccacagaaataagctgaaaagaaagtcatgtaacacatctgtccaggacagtatttcagcactctgcatgtctcctcattctgtgcatgttgtgttcacacctaccatttggggcctgtctcgacaaagccacagtcaccatttagataatttgataattgtatacacctgggctgagctacttggctggttgggatcacctgggctgtgcaaactggctgattgcaatcacctggtttctgctaatttgcttaatttatctcagcttcaggggtagaatacggagatgtcatctgacctactttatttctgaggttttttttaagggtcatatgcagaaataaacatttcatagacatacccatgtgactcattttgtgtgtatatgtttatcgagccacctattttgtatctatatgtacagaaagaagcctataaaataaacttgatctgaggctatttccattttctttacctacaggttaggtaaatcagtcagctactgagctcagtgaagatttattcaaaccaagccacacaccatattacattttttcataaatgtaaaaatatctttaataacctggaacctgggtgtttttaattctcatcccattaaaccagccccatgaggttctgttcgtctatctaggaactgccagaaatgcttgacatcagtgggctgagccttcctcacaaagcagatttgacctggcaaataagagccacctgtggcacttcagtgaatgttcactatcacccatttgaaatgtggccaagtaccatgtaccattatatttgcttccatcatcatcatcatctatcttctaaaaagagacctagacttctttttcattaccataaatacctgacttctgcctcaaagacaaaaagacaagagtgtgattttacatcacacactcttggaaataaatacagttcttgtcttgatgaaagttctaaagagaaagaataagtattctcatatttaggttaggacctttggactggggctggttcatctctgaccctacatacaacaataaaagaaaagtcaatcctgacatggcagtaaataactccaaaggccttagtaagtattcatcttccagaagcgcacaacaaagcccagtgcttcctttgaatatattaagtgcagcaggatgtatatcagagcattcctctatttctgtactattctagatatagtattctatagggaaaagatttttatacatgtatgaaaggtttttgtattactgtttgtagcaatagctatcaatacttccacattcaatgtctttattctgtatgaatatatataaagattgttccagcttcatatatatatacttatacatattaggtatgtatatgaatatacatacatggtagatacataaacacaaacatatgaatgtgtctttgtaaatattaatgtatacatataatattctcccactttttaaattatagagcgtatactaaggatgcaggtgtagaattaattgccttctgttttgctcagtagcatgtcagaataaaacatagccatacaatgttgtttatagaaacataaaggttcagcttcaggtttcaggccttgtaaagctgtgtggtatatactgtccaggtgagcaaataaggccctgcatttctttttggtgtgcatgggctatttacatttaccattttgggcatacctgaatgaatctgtagccactagttagataattagctgatcgggatcacctgggctgagctaattggctaattgaattcacctggactgatcagttggttgattggaatcacttgggctgagctaattcactgattgaaatcacctggactgagtgaatggtggttcaaaatcacctgtgctaaactaatgggctcatcagttgagctaactggctgattggtatcacctagaataagatagttggctgttagaaatcacctgggctaatcagccgggctgagctaatttgctgattggattctcctgggatgtgctaatgggctgcttggaatcccctaattggctgatttaaattatctaagctgagttaattgattcagaaaagttgaacactgagctgggccggtggctcatgtctgtaatcccagcaatttgggaggccgagtcaggcagatcatttgatgtcaggaatttgagaccagtctggccaatacagtgaaaccctatctctactaaaaatacataaattagccaggcttggttgtgggtgcctgtaataccaggtactggggaggctgaagcagcagaatcgctttaaccagggatgtggaggttgcagtgagccaagattgtgccattgcactccagcctgagcaagagtgaaactctgtctcaaaaaaagaaaaaatatctatctatctatctatctatctatctatctatctactgtcagaggatgataacttgaagtattttagagatgttaagaatctgaaattatttttacttttagtttttataaatgtttcttaagcatttttaatttccaaaaaacttgtaaataatgttgtcagtttaatttttctgaagaatttaaatagagtcaaattatacatatcaaaaaatctacttttctggtagtagatcagcttaattttcagaacaaatgtgttaaacttcacgagattttatgctgaccaatttgatcagtagcctctttcatacaactgggagagatgacaccaagatgtagcattcatgttgggtgagagactaaatgactaccagtagctagataatttctgttttactaataaatgtttattttcatttctatattgtctcaagttatgttaacaataaagtaataacctttatccaggaaattttgaaaacttattttttaatcagccataacagtaagcaaagacagagaaatgaaggtttttaccagtcataatttatatattaaaattaaaatacttctagaaataaagaaggaaaggaagaaagaaatatacaaacaaatgaaaagcagcctggtcaacatggtgaaagcctgcctctactaaaaatacaaaaattagcctggtgtggtggcatacacttgtaatctcagctactcaggaggcttaggcatgagaatcacttgaacctggtaggcagagtttgcagtgagctgagattgtaccactgcactccagcttgggtgacagaatgagactccatctcaaacaaaacaaaacaacaacaaaataaaagagaaggaaggaagttgattactcacaatagctaaggtttgaaatcaacctaagtgttcaccaataggtgaatggagaaagaaaatatggtatatatacacaatgaaatgctattcagcccttaaaaataagaaagtcttgctatttgcaacaacattcatgaacctgaaagatattatgttaagtaaaataagtcagcacagaaaaaaaacaaaatcctcgttttttttttttttgagatggaattttgcttttgtcacccaagctggagtgcagtggcaccatctccactcactgcaacctccagctcccaggttcaagagattctcctgcctcagcctcctcaggacctgggattacaggcatgtgccaccacacccagcaaatttttatatttttagtagagataggatttcccccatgttggccaggctagtctcaaactcctgacctcaactgatccacccacctcagcccctccaagtgttgggattacaggcgtcagtccctgtgcccagcccacataatcctatttctatgtaaagtgtaaaaaaaaaaaaaaaattaaactcatagaagcagatggtacaataataaaacaaacaaaaaatcccctataaggttttttgtctggttaagagagcttcttcaggatttttcaggggttatattttcttttattttccacattttcctgttcttcagccaatggatgaaaaaagatacagagaagacacatttaccttttatccgcttcacttccattcactattattcaatgtggatacagatgagagtagcagttttctagtaggacagccacttctctgcaataaacaaaaaactgaaaaaaaattagcatatgcatcagtaacccttctagtaaaataaagattaattttgttgatttctattgagttcctgtaatatttgatcaaaagctagcaaaagcacagtagaaaaggaaaattgttctaaataagaatattgtgaatggttattttgtcaatataagtaaaaatatgacctcacactaatagtctcacctatagttgtacaacatcaaatgctaatttttatttaaaattttatttcatataagtattcaatttatatcacctgcctctgctatttcaatgcctccttcactttatatcagtgaaaaacaggccagcaggtcctaggaaagcacgtcgtgctattgctactttaacaataaacaggtcaagcatggtggctcatgcctgtaatccagcactttgagaggccgaggtgggtagatcacagggtcaggagctcgagaccagcctggccaatatggtgaaacaccgtctctactaaaaatacaaaaattcccaggtgtggtggctcacgcctgtaatcccagcactttgggaggctgaggctggtggattgcttgaggtcatcagttcaagaccagcctgggcaacatggctaaacctcttctctactaaaaacacaaaaaattagctgtgcatggtggtgggtgcctgtaatcccagctacgcaggaggttgaggcaggagaatctcttgaacctgtgaggccaaggttgcagtgagccaggatcatgccactgtactagaccctaggcaacaaagtaagactcctctcaaaacaataaaatcagctgggcgtggtggcgggtgcctgtagtcccagctactagggaggctgaggcaggagaatcgcttaaacccgaaagccagaggttgcagtgatctgagatcataacactgcactccagcctgggtgacatagcgagactctgtctcaaaaaacaaaaaacaaaaactgatcatgaatagcacttttttggttgctacacacgtgtcaaacactgttatttggcttaaggtactggtttttttttttttctttttcttttttgagatggagttttgctcttgttgcccaggctggagtacaatggcacaatctcatctcactgcagcctctgcccacaaggttcacacaactcttctgcctcagcctccccagtagctgggattacaggcacctgcaaccacacctggctaatttcttgtatttttagtagagatggggtttcaccatgttggtcaggctggtctcgaactccagacctcaggtgatccacccgcctcggcctcccaaaatgctgacattacaggcgcgagccaccacattcagcctggttttctattttttttttttttttttttttttgagacagagtctcatctgtcgcccaggctggagtgcaatggcatgatctcggctcactgcagtctcttcctcctgggttcaagtgattcttctgcctcagcctcccaagtagctgggactacaggtgcatgccactatgcccggctaatttttgtatttttagtagagatggggtttcaccatgttggccaggctggtctcgaactcctgacctcttgatccacccacctcggcctcccaaagtgctgggattacaggcatgagccaccgcacccagccctattttttttctaaatttactggtaatataaaattcttcgctaagaagacatgatcttattcaaatgttttatgagatttcattgatgtctgaattatctggaatattaaaatttttcatgaactcaaatcaagtactatacataatcttttagtaaaagcttttctgaggcagagtaagatttataacattttattatcatatggaagaagtgtattaaccatgttttcagtaatcactctgaacacagcattctcagttcacagtgtaaaaagtgaagtagaggttcctcttcaaagacttttctacctaattatgaatagtaacttctcttagaagcaaagtttattcaaagacctgtgctaacattcttaaatatctgctaagcacaattaaaaaatcaatgtactttatgttcttagctcccacaatttagcctaaatatttgccctggcatgcttatactaatccaagcaagcattaggtcatagcctgttcctcctccttatttgaaggtatttttacctttctcagcattccacaagttacttcctccttcctttgttctcctctgcctttgtctcttttaaaaagttctaagttgctaaacaattgggacatacagaatgtgaggtcccattccagccaatgaaaaccagacacagcagtagggtggacacgtcaagttataaatgactctgtctcctctgttcagtgtactcgtggcaaaactgctttctgcaaaaagtaaaaatggccttgctaagaaaaattaaatttattttcaagtgctatttctttacagctccagagaacaaacatttctaaaaccattatggaccctgagtaattcagggggaattggtatctctgtaaagagacagtaaggaaatgctgagtggaggcaccacactgcacatcaatgctttccacatgcacccaatagagtcttaatttaattgggctgttatttgcatagctagataattaccaactttagtcatactattttttagcaactaatggcatctgttacccattaattttatacatttgcttttttgaaaaacaaatcttttgttaattcactctaaattgagactacatttacaatcttcagtttttcagtgttaaagcaaatcagagaagagcaatgtgtgtacataatgtgcattttcctgcctaccaaaattattctggctgggaaaagtggctcatgcctgtaatcccagcactctgggaggctgaggtggatggatcacctgaggtcaggagttcaagacaagcctggctaacatgatgaaatcccatctctactacaaaaattatccgggcataatggcgggtgcctgttatcccagctactcaggaggctgaggcggaagaatcacttgaaccagggaggtggaggttgcagtgagctgagcacgtaccattgcagtgcagcgtgagtgacagagtgagaatccttctaaaaaaaaaaaaaagaaattctttcttcaattacttggaaaccctgggaagcccctataaaatactccctttgaatactttagccaggatttcagatttcaaaaggtcaaaaacaatcattgagcaaagcttaaatcttgcctttgtttcttgttagtcatctggccatttctgtaagtacggcaattatgcgaagccattgaaaaaatgtggtcttggtaaattttattccatttcaaatgttttctctaatgttaccttggtcatgtgaatctaaaagaaactatctacataactaatcatggattcaaaaaatattcatattaatgtgtttacagtttaatcttgtattacagtatagtagaatcctctataattagaagttaattatttataaattcattgtttttaaggtttttcaaatatgaaaacagacaattaggtatactttttgaagtaagttcaattttaggacattacccactggtcttcatggcatttctgtaataaatagtgtaaacctgtgtcaccagaatggtgcagacatgctgattgaattagaatgagttcagccttgttggtagactattggtatcccagaggctgatcattcactacagcttactaaatactgttccataatgccagtgagcacttttacccaggttacctttttcctcccattaatgtggacctgttgtggtctcctgtttctcttaagctatcccagatgagaggtgattatttcttgaatgaatgagattcccttttttttccctctgccatagaatcctcttatgttccttactggaagcaacatggaggaggcagaaatgatggcaagatacaaacatttttcccgccatgtggccaccataagcagcttacaacatgttctacctagaagtcacttactttcaggccagcaggggtgtttttctgtgatgtgtctctttctcttaaaagcacctctgattaagtttagcacaatcaggataatctccattttgataaacacaaagtctacggatgagtaacctaatttcataagtgatttcccaccacagtcacacattttttttacactcaagaggaaagtatgacacagcacgtgtgcaacagactggtaatccagggtattatcttagaatgttgcctacccacctaaataaatgtttaaaatcatcttttgctgggcacggtggctcatgattctaataccagcaccgtgggaggctgaagcaggcagatcatgaggccaggagtttgggaccagcctggccaacatgatgaaaccctgtctctactaaaaatacaaaaattagtcagacgtggtggtgcatgcctgtaatcccagctacttaggaggctgaggcaggagaattgcttgaacccaggaggtggaggttgccatgagctgagatcacgccactgctctccagcctggaagacagagcaacactccatcatggaaaaaaaaaaagagtctttctgctgcttttgttatctacataaacaaagatatcaactggatataataattaactactttttagttttattcattacaaataactatttttctggcttaaattattttttatgcaccatttatacattcacacacacatagaacaataaaaatatatccaattattcaattttggttgaatgttcattcaaataagtgttaaaaatgatttttttttcctgttttaagagggcttttattattgtactcaagagagttgtttctggagacaaagttgcctgtgctttaataggcagactctggggagaatccgaatcacaggccagaacattttatattaataaattcaatacaaagcagaaagtatagatttgctttcaccattttaaaagtgtttagttttgttaatcacctaaataacataatttgttttgttgcagtaattgcttttattctgaaaatatgtacaaacctatactcacacaaaaacactcaattcataattttcttacacctcaggtttatcttcagagtaatatgtgtatatttaactctatgtaaattaaaactaaaagtctatgtgtttgcaggcagagaccacatgttcaaggaaaactatattacaagtatttataatttttcaggactcagaaatgtatggattttatttttattttattttttgagatggagactcactctgtcagccaggctggagtgcagtggcatgatctcagctcactgcaacctctgcctcctgggctcaaacgattctcctgcctcagcctcctggcatgtgccaccatgcctaatttttgtgtttttagtagagacaaggtttcaccacgttggccaggctggccttgaactcctaacctcaagcattccacctgtctcggcctcccaaagtgctggaattacagatgtgagccactgtgcctggccgtattttatttacatttttgtataattattatgatcatagaaataattctgtagtcaataacaatttaattgtacattttaaaatgaataaaagcatataattacactattggtaatacaaaagataaatgctagaggtgatggataccttatttaccataatgtaattactacatattgtaggcctgagtcaaaagatgccatataaggcataaatatatacacatattatatacccacgaatacaaataaaaaatttaaataataaagagtcaaaatttaatctatgggaacaatatttaactcatttgcagtttaaagccactgacagtgattactaaagatgttattttacaatgtatgaaatagtatattcctacaatattgtacctacacccttgagtaaagtgggatacagttagtggcacaataatggttcattaaacgcacggtagtcttaccatggtaaaaataaaataaaattaagttcacaaataatctaacaaacttttttttttttgagacagagttttgctcttgttgcccagactggagtgcaatcgcacaatcttgccccactgcaacctctgcctcccaggttcaagtgtttctcctgcctcagcctcctgagtagctgagattacaggcatgcaccaccatgcctggctaattttttttgtatttttagtagagactgggtttctccatgttggtcaggctggtctcgaactcctgacctcaggtgatctgcccaccttggcctcccaaagtgctgaaattacaggcatgagccatcaagcccggccctaacagttttaaaatgcactgcattttattacataaaagtacaagtagtaaagtaatatactcatttattttaatatacttttaattatttctttgtgtcactataataaagtattgctctgaacatttacgttatacattacttaatagaattttactacaaacagcttctccacttgtattttcattatgcgtcttacattttaatgttcttactattttatagaaaaagtcataatgtccaaataatgtaaaaaaatcgaatatctctgatgcagaagccactgatcacatgctttctcacatgtgaatagaaataaaataacagcataatttgaaagctgtattacatcattattcagctttcaaaaaattttattcaaggaaacaagtatactttcaacgtaattacaatgcttccaaaaatctactccttttaaagttaaatagaaatcatttacctaaaaactgcagttgtggattagtttttatattcaatgctctgatttagtgtaatgtctgaagtgtcggggccttagttattctactgtaaactctcttgatatttatatacaatctattttgaattaaatattttttaatatttactgcatctgcaaaattatattttagcataaactctctgttgttttctaagctgtagtttctggggaaaaaaaagtgtttctaaacttaatacatttgtaggactcatctccaatataaattccctgatgttgaacaaacttgagcaactgctttaggattttcctccagtacaaaatgtgtgcaataagatctgtgatactagtaaatgtactatgtaactccctttatatttgtaatgcttgtcttcacaataaatactcttcttcactttaaaggcttatacttgctgaaagttttgacagtaattgccattttaatgcttttattaaaaggaagatttttatgttgagttagatgtgagtaggaattaataggttttccatattccttctatttgtacaatttttctcaaggatactagcttttctgtgagataaggtgtaagaactgattaaaagttttgccacattcttcacacttgtaggagttttgccagtatgaattatccaacctacaatcaagagtggcaaccatataaaggctttgtcacattttatatatttctagggtttcacactagtataattattgttatgtgtagagaagttggaggtgttcgtaaaagcaatgtcacattttttagctttgcggatttcctcttcaacatgaattattgccatgcctcttaagaattgagaacttgtggctgggcgtcgtggctcacgcctgtaatcccagcactttaggaggccaaggtgggtggatcacctgaggtcaggagttcgagaccagcctggcaaacatggcgaagtcgcatctctactaaaaataaaaaaattagctgggcatgttggaggacacctgtaatcccagctactcaggaagctgaggtaggagaatggcttaaacccaggaggcagaggttgcagtgagccgagatcatggcactgtactccagcttggatgacaagcatgaaacttcatctcaaaaaaaaaaatattgaaaacttgttataggatttgccacattcctcaaacttgtaggatttttgtccagcatgaattatgtgtaagaagggttcagaacttcctaaaagcgttgtcacattctttatatttgtagggtttatgttccatataaattctcatatttagtaaaagttgatagctggttaaaggctttccgacattcatcaaactcacagggtttctctccagtacgaattatcttatgtctagtaagggcagaggtgtccttaaaggctttgctgcattttcttatttgttgggtttctttcccgcatgaattatctaatgtctactaaggtttgaggatgaaataaaggctttgccacatttatcacacttgtacagtttccctccaatatgaattttcttatgtgaaaaaagcatagtgggatagcttaaagctttgccacattcctcacatttatagtttctctccagtatgaattaccttatgtgtagtaagggtagaggggcacttaaagcctttgccacattcttcacatttgtagggtttctctccagtatgaattctcttatgtctagtaaggataaaggagcgcttaaaagccttgccacatcgttcacatttgtagggtttctctccagtatgaattctcttatgtgcagtaaggtgtgaggacgagttgaaggctttgccacattcttcacatttgtagggtttctctccagtatgaattctcttatgtgtagtaaggatagagaagcacttaaaggccttgccacattcttcacacttgaagggttgctgtccagtatggattatcttatgtgtagtaagggaagaggagtacttaaaggcttcgccacattcttcacatttgtagggtttctctccagtatgaattctcttatgtgtagtaaggtgtgaggaccagttgaaggctttgccacattcttcacatttgtagggtttctctccactatgaattatcttgtgtgtagtaagggatgagaagtacttaaaggctctgccacattcttcacatttgtagggtttctctccagtatgaattcttttatgtgtagtaaggacagaggggtgcttaaaggctttgccacattcttcacatttgtagggtttctctccgctatgaattatcttatgcgcagtaaggatagaggagcgcttaaaggccttgccacattcttcacatttgtagggtttctctccagtatgaattatcttatgtgtagtaaggttagaggagcgcttaaaggccttgccacattcttcacatttgtagggtttctctccactatgaattatcttatgtgcagtaaggtatgaaaaccggctaaaggctttgccacagtcttcacatttgtaccgtttctctccagtatgaattctcttatgtgtagtaaggtgtgaggaccagttgaaggctttgccacattcttcacatttgaagggtttctccccagtatgaattttcttatgtgtagtaagggttgaagactggttaaaagctttgccacattctatacatttgaaaggtttttttccagtatgtcttatcttatgtctgtttgaatttgaaaatttatgaatgactttcacatatttatcacactgaaatattttgctttgagtagttgtcaaatattggttaagtccattataacctcttttgtgcaccttacactcatctacactttcacagccctttttaaactgtaaattgtcatgtccatagttttcatatcttctcagtgtcactttttggaaagaatcttttatgctctgctctggccaaagatctcgggcaaaatgagaacacgtaactgaaagaaacaataaaagcacattacttcaattggtagactcagataaatatactttacagatctaacctatataattatacaaactacataagcaagatgacacagcaaaataccacaaactgtaatttcttcctggatacataaatgtaacaaaagtggactgcccaaaatacatttgtaaaaaatttataagtgagttaagtgtatgaagggccccaggtgagcacaatgcaaagagccacatagaataaaaagaaaattctgttacttatacccaacagagctcttcctgctctccagtataatattgtgcctttaaaagtaaatttccagtcggatgcagtcgctcatgcctgtaatctcagaactctgggaaggtgacacatgggtggatcatgagaaattcgcccccatgacccaaacatatcccaccaggtcccacatctaacagtgagaatttatattgcagcatgaggtttgaagaacatagacatccaaaccatattatagaccacctaggattcacagccacacacaaaactctccagtcaaaaccaagataatacacagtattcctatttgcatctggtgtattctgttaggacacatatgaagttttattaaattaaaaatactatgtgctgtagctcttggctataatcctaacactttgggagatccactggggccaaaagtttgagaccagcctgggcaacatagtgagatcctaatactacaaacaagcaaacaattatccagacatggtagtgcatatctacagtcctagatactcaaaaaactgaggagaaaggatcacttgagtccaggaggctgaggttacaatgagccacaattatgccactgcactgcagcctgggtgacagtaagatcttgtctcaaaacaacaacaaccaatcatttttaaaacactaaaattacacactgtgtgttttctaacaaaaactgaatgaaactaggaattaaaagcaaaagtcaaactggcaaattctaaaataagtgaatatgaaatacactctacaacatattcttgctcagggggcaaaaaattttatttttcaaagttgtcaatacaacctacagttaaaacctacagtaacatggccaggcatggtggctcatgcctgtaatcccagcacttttggaggccgaggcaggtggatcacgaggtcaggagattgagaccatcctggctaatatagtgaaaccccatctctactaaaaatacaaaaaattagccgggcatggtagcaggcgcctgtagtcccagctacttcagaggctgaggcaggagaatggcatgaacctgggaggcggagcttgcagtaagctgagattgcgtcactgcactccagccagggtgacacagcgagactccgtctcaaaaaaaaaaaaaaaaaaaaacaccacctacagtaacataaacaatgtgacactgacacaaagataaacaaatgaaagaacagaatagagaactcagaaatgaacccttctgtatatgatcagatgatcttccacaaagttgccatgcatacaaaatagaaataatctcttcaaaaaatgaagttgaaaactgaatatcaacactgataaagttgtttatttccttgaatgacacaataatacattttaaataaaatgcttaaacataaaaatacacaagtgaggaaaagcatttgaaagaacatacaaaatcattaatttatacagaaattaaaaaaacacacaatgacaagatcaacttacacccattaggtgcaataaaaataaaacccatgttgattgctggtggaaaacaaagacacagccattattttaaaatgttgtaaatgttcctcatttataaatctctatccaaaatatgtaacacaggccaggtgcagtggctcaagcctgtaatcctagcagtttgggaggctgaggtgggcagataacctgaggtcaggtgtttgtgaccagcctggccaacacaccatttctactaaaaataaaagattagcttggcgatgtgacgtgcacctgtaatcccagctacttgggaggctgagacaggagaattgcttaaacccagaaggcagaggttgcagtgagccgaaatcgtgccactgtactttagcctgggcaacagagtgagactccatctaaaaaaaaaaggaaaacaacagcaacaacaaaaatatgcaacacaggacctggaagatataattgaaaatccatgtgtattgtaccagtattcacaaaagccaaaaggctgaagcaacccagatgcctcttgatttataaacatatcaaaaaatgtaacatatacatatgatgaagtattattccaccttagaaaaaacaatcttgtcaattttaagatgaactttgagaatattatgtcacctgaactaatccagtgacaaaattttggatactgtatgattccacatatatgatatatcttaagtagtcaaaatcataaaatcagaaagtggaaggtttgtctgtcaaaggctggagagagggtaaaatgagcagttgttacttaatggtcaatggcttttagttttacaagatgaaaactttctaaaagtcttttgcttaacaatgtgaatatacttaacatgactgaaatgaacagcttttttttttgagacacggtctcactctgtcacccaagctggagtgtagttgtacaattttgacttcccttaaatctcccaagtagctggggccacagctgcacatcactatggctggctattattattattattttttatagagaggtgtcaccatatgttgccctggctggtctcaaactgttgggctccatggatcctccagtcttggcctctcaaaatcctgggattacaaataagagcctccaccaagcctggccctgaaatgcacacttcaatagatttaaggtggtaaattttatattacgtgtttttaagcaattttttttaaagaaaaactgaaaaaaaaaaaaaaaaaacaattatgtatctttttgaaatttactttcaaatcatagaagtgtctctcacaaaagcaaatatatattcattgttaaacacatggtgataataagactatctccataagtactcacttagacaagataaaactaccatcaaaaatcagctaagaaagaatataagccataactaaaattggggtcatatttatagataaatacacatacaaatgtaatctgattatgatagatatgcataatttatctcttaattaaaccttaaattgacttaaagtgtacaaaaagaactgcaaattgtctaaaattataatacataagtaaaaccaaaacacccaataaactaatcttaagaaacctacactgaggccagaggcagtaggtcacatctgtaatcccagcactttgggagaccaaagtgtgcaaatcctgaggccagcagttccagaccacattggccaatatagtgaaaccccatctctgctaaaaatacaaaaattagctgagcatggtggctcatgcctgtagtcccagctacccaggaggtcaaggcagaagaatcacttgaacctcggaggggttcaaaacttcaaaacaacaataagagaaatgtttactcataaaatcttgtatgcaacattgaagtataattaaaaaaaaattgtcaggccgggcacagtggctcaaaactgttatctcaacactttgggaggccaagatgagcagatcacctgaggtcaggagttcaagaccagcctggccgaagtggtgaagccccatctctactaaaaatacaaaaattagctggggacggtgacacacgcctgtaatcccagctacttgggagactgaggtatgagaatagcttgaacccaggaagtggaggttgcagtgagccaagatcataccactacactccagcctgggtgacagagtgtgactccatctcaaaaaaaaaaaaaaaaaaattctagataactgcaatatttaactgttggtgtgtactcacaaaatgcaagtattctgaatcattagcatgcactgtgtggcagtaaaatttcagagattatgcagtataattataaatagaagattctaatgagaaaataaattagcatttaaaagaaactagttccttttaatgtcttaaatatatggtattcttacacaaaatgaaactgctgtaatcaaacattggaagcaaagagtacccttacattgttaaataagaaatatatattttgtagaatggggttagaccctctgatatgtaaaacaaatattaggaaataaactattttattatggagatataggctgaaaaaagtagatgaacatcctataattcctttttacctgcagcaaatttaaatttataaataactattttagtaactatgggtgcctactaattatgtaatttacttcaggcatatcatgcaaattctagcatattgtcttcaatatttgaatctaaaattacagacaaatctgaaagagaacatagaaagtaaaaatatatagggagagtgacatcagtaaaatgaaaagattaaaagtgccctattttcatattcccttacagcaaaacaagtcagccatcgctgacaaaaatacctttatgagagaaccaggattatgactcacacctgtaatgacagctccatggaacattaaggttggaaaattgcttcaggccaggattttgagaccagcctgggtctcaaagaccagatcaaagatgtagcaagatgccatttccaaaataagtgcctctaagggagatttgagagctagggtgggagttgtgaaatgctgttaaagcgtaaggttgagaagtgttctattcagaaggcaggctctcattcacgtgggaaactacagtacccctgttcatggctacagaccaggatagggtttacccaagttggtcccacagagaattctgaacttactctgtaaccagctcaaactcccagccacagtctggcagaggtcctgccattccagagacctggatgaaggcacccatttacagcaatgtaggcaggcttgcagactttggcctttactggggtccctgaagaggttcaatgactcagtttcggttacctgagccacagtttatggtcagttctgcctacatagaagcccacacaattgggccgggcggggtgcctcatgcctgtaattccagtactttgggaggccgaggcaggcagatcatctgaggtcaggagtttgagaccacccttgccaacatggtgaaacccagtctctaccaaaaaaatacaaaaaattagctaggtgttgtggtgagcaccagtaatcccagctacccagcaggctgaggcaagagaactgcttgaacccaggaggcgaaggttgcagtgagccgaaatcacgccattgcactttagcctgggcaacatgagtgaaaccccatctcaaaaaaaaaaaaaaaaaaaaagaaagaaagaaagaaatccattgcaattgaagaaaaataagtaaaagttgctgtttgtggatcatacatcttacattttaaaaaccataaacagtacattaaaacctgtctaaactaatgaatacactgagtaaattagcaaaatataaaattaacacacaagtacatgtattgtttcatacgcttaaaacaaactatctgataaaatagaggaagaaaaaatcttatttaatatagcattaaataataaatttctgagaaaaaaattaaccaagaaggtaagaaaatgtttacaataaaaaaatgaaaaaattagaagatccaaacaaattttaaaatattttatgtctagggattgaaagaataaatattattaaagtttcatattatccaaagtgatctatagattgcataaacgtcctgtcaaaattgcagtgttttttttttacagaaatggaaaatacaattctaaaatttacatgaaaataaactctgaatagccaaagcaatcttgaaaaaaaaaaagaacaaagcagaaggatatcatacgtataatttcaaactatatttcaagactataatagtaataaaaatagaaaggactacatagaaaaataaacaaaaaaattggacagaaactactactctcacacatcagacctgatgcaaaaagagaaataattctcaaaatcatgcagatatttgtgtgtccccaaaacaatgaaaaagcagccagactgtgcagtattttatatgccatgaagaggactctggctctcactgtgaacttgaagggagctcaccgaaagaaaagtagaatttttacagaatttaaaagcataagcagaagatgcccctttataagagcaaaatttaaaaaagaaaaaaaaaaaaaaaacagctcccaggaactattttctttggagcacagcttcccaaatcacactttaaggactggctttctctttgactttgggacctcttatctgtgtcgtctgctatattcattttcacttgcacctacctgaggggttggctaccatctcatgtttcttcatggtcaaaggtttttttccttgctccagacaggtgatgaggtctggcttagagacaacaatacctgttttattaaaaataaataacatgaatcttgctcatattctccaattacaagctagtaatgtgctcgcaaagacaatgtaataaaatattatagtaaattaataccaaaatacaaatttataacagaaatttctaaatatttagaaaatactttaaatttgccaggtgcagttactcacgcctgtaatcccagcactttgggaggccaaggtgggtgaatcacgaggtcatgagttagagaccagcctggccagcatggtgaaaccccatctctactaaaaatacaaacattagccaaacacggtgacttgcccctgtagtcccagatactcatgaggctgaggcagaagaattgcttcaacctgggaggtggatgtttcagtaagctgagatcacaccactgcactccagcctgggtgacagagtgagactctgtccccgaaaaaaaaaaaaaaaaaaaagaaaaagaaagaaaatactttcaatttgtaggtttcttaattttccttcctggtactactgaatcaaaaattggtggtggcatttagattttcaggtggaagctacaatagtttatgtcagtaaatttctggaattaccactaatttggagtgaagattacagctcacctcacaaatatggaaaatttggattaagatgaaacatcttgaagaaatttttttcttttctttttttttccccttgagacaaaatcttgctctgttgcctgggctggagtgcaatggcattatttcgactcactgcaacctccgcctcctgggttcaaggtattctcctgcctcaccttcccaattagctgggattacaggcatgtgccaccatgcccggctaatttcttgtacttttagtagaaatggggtttcaccatgttggccaggctgatcttgaactcctagcctcaggtaatacccccacctcagcctcccaaagtgctgggattacaggcatgaggcaccaaagaaattattttctaaatgaacaaattctgaagattttcttgaaaaagtggatctgaaactcttttataaaagaataaattactaaaaaaattctacaagagagagaaataaagtcttttgtgtatattatgaattatgtattaaagtttttctcaccaaggaagaccaggtttctgtagttctctaacatcacattcctatataaattccgctgtgcagtgtccaggcaatgccactcctccagagagaattctatggccacgtctctaaattgcaatggcccctgaaacacacacacaacatacgtttttaccaagtagccaagggtggaatttttaatttgacttaagttcaaatgagagagtaaagacaaatggttctgacttataggactgactaaaattatccaataaaataactttcaacacagaaatattctctaaagtattctctgagaaaaaagaacagcataagatccacaacatcagttcatgtatttttctagatagtaaagtgtaaaattaagggtatgaacacgaacatgtacatttttgagtgctatgtttacatcatatggaatgagctgtgaatatttttcagatgacaaagacatgttgagtttagaaggcacctctaaaatttaaatatatacaataagttgaagaccttgttatgcagggtttttttccagaagatctggaataaagtttgattttttgaatttctaacaagctcaccaatgatgtcaatgtttttggcccaagaaggatattttgtcaaacatccagtaagtggaagagcctgtttttcccagtttttctggcctgtaaacaaagataagagtcttcattttccaaagaaaaatatgtagaaaaaattaagaaaaaaggacaactgccagattaaatgtggtggtttattcacatcagctgcataaagatacttaataatgaagagaaaaataatcagctacatagtgaaaaatatctgtcacagagctatttaagcaagtgaatcattaaccattaacttcactagaagaaatttttatgttgtgctaatgcacatagaagaacacagcatcactgttgaaatattcctcttttaaaaaagtaaataaaatctgattcaatcataaagaaccatcagttttatgcaaacctcaaaatacagataactcctgtgttctgtaatttttagtagtaattttaaatagacttcatttagcaccctaaagagcaggtatgtcctaataagttttttcagaactttctgggtaataaatggcatcccatttaaataagcatttctttttttttttttttttgaggcaaagtctcactcttgtcccccaggctggagtgcaatggcatgatcttggctcactgcaacctccgcctcctgtgttcaagtgggtctcctgcctcagcttcccgagtagctgggattacaggtgcctgccaccacgcccggctagtttttgtatttttagtagagacagagttccaccacgttggccaggctggtctcgatctcctgacctcaggtgatctgcccacctcgaccttccaaggtgctggaattacaggcatgagccattgcgcccaatctaaataaggaatttcttttcttttcttttcttttttttgatatggaaaatcactctgttgcccaggctggagtgcagtggcgcaaccttggctcactgcaacctctgcttcccaggttcaagctattctgctgcctcagcctcctgaggagctgggattgcaggcacccactgccatgcctggctaattttttgcatttttaatagagacggggtttcactgtgttagccaggatggtctcaatctcctgacctcgggatctgcccgcttcagcctcccaaagtgctgggattacaggcatgagccactgcacccggccaataagcaatttcttaatcctgttcggcatacagctaatggaacacactaatggagcctcaacattacatgttctccatctttactaaggaccacagttttccccaatagaacatgagaagttatgatgtagagaatgaagaaaaggctctgggatacagcaaagaaacatttttcagacacctttgactatcgtaagaattttaagaagtacttaaaccaaactccttagggaggagaaacacaagtagagaagtaaaggtttgtgagtactaaacgcatggcagtccagaaggcagagtggacacagcttttcagctgaggcacgtttacctaaagaaaagccttttttttttgttctcctatctcctccttcactggaattccttctcagatgagattctttggacaaattacacctgaatcttgagaatatgcctttaaaggtgtcagtaccacaagtatacctgctagcatgacatcaactggcagaaaaagacagaaaaatccacccatttctgtcctttaaaacagaagaggttcaggaaaaatgagctgctccataaagatgaaaatataagtttctcctttcctgtcctcaggggccctcccctaccacagacaccatccatttctgctacagtaatggaaatatgtgccactgacctgtccctaccaaacccaaacagaacagaccctgtggccaccctttagtgcaaaggtggaacttaacgctcatgaatgtattttgcagccttcatacctgattctggcctcaccttacagtcacataaggcccttcgttaaaacaacatggatgcttccacccagaacaataaacagaagctgtggggagggcacaagagatttctgcaaattggccatgtgatcctaatgagaggcctgggctgataaccactaagctaagcattgcctctcaagctttaacgagctaagctaagcattgcctctcaagctttaacgagcttataattcacttggtaattttagctccactttatgtaatgtgattctgcaggtttgaaaagggtccatgaatgggtgtttcaaaaacaagttccctgtcaatgctgatgttgctccccattggctcattattaccattagtcagagaagcagtcacagcacatagtcccttatacttagcactcttgtcacaaccaaatacttctcatacaaacaaggacaacccatctccatcctaaagttttatattatttgatggctctttaaagtttacagaggaaacaaggcagcaatgtctgaataagtctgtttttaaaaaacaacatgtacacatgtactaatgcactgtttgttaaacaggtactatgtgcacaatagtatgatacagagcactgtgctgggtataacacattaggtgatttaattctcataacacccggggagctggtactaagggtttaatagttttcaagatttagttaaagggcccagcatttttatttcttcttctgtttctctctcatcaattttttaaaattgtacagaataaaagctaaatatagccagatgaaagagatagaaagaaagaggttaatgtagtttagacaattttattctgtttatatttacttttttgtgacttatggagcaactactggatctgcaggaatagaaaacaagtttctaaataaatgtctccgcaagcactggttttaatagaagattaaaaaactaggaccctaaaatacatactttatttatcccatttatctgtttgtggtttcaggaaattgtgagcaccagctctagaaaggcagcaggattcaccagccaaaactttgatctcttctaatcagttatctgaagcaagactacaagatagggtcagacctaaataaggcctccaaaaagggtgaatctgaacaggtctgggtctggctcagggtgaggaccctatgtaaaattctgctctctatgtcactgcagtactaccagttttgttttttctaagcttacctaaaaaaaaaaaaaaagaaaacttaaatcccagagtttctgtaattttagtattttctagccactgccctgtcaactttgtactacattctaatacgcaatttaaacaaatcctttaaggttttctagggtaattttttttttttttttgagatgcagtctccctctgtcacacaggctggtgtgcagtggtgccatctctgctcactacagcctctgcctccagggttcaagtgattcttctctctcagcctcctgagtagctggaactacaggtgcatgccaccacgcccagctaatttttgtattattagtagagacagcatttcaccatattagccaggctggtcccaaactcctgaccttgtgatccacctgcctcggccccacaaagtgctgggattacaggcatgagcaaccatgcccagcttttctagggtaattttattagaaaataaatatgtacatgtagcaaggtaaaagaaatagaaattatatggccaggagtggtggctgatgcccataatcccagcactttgggaggatgatgtgggtggatcacgacctcaggatttcgagaccagcttgaccagatggtgaaaccccatctctactaaatatacaaagattaaaaaaaagatatatataaattagctgggcatggtggctggcacctgtaatcccagctactcaggagcctgaagcaggagaatcgcttgaaccagggcagcagagggcagcagtgagccaagatcacacaactgcactccagcctgggtgacagagactccgtctcaaaaaaaaaaaagaacctataataacaattcttctgttcataaatatgccttcagatgtagacatcagaagtctcaaaaatataaagaaagtggcctaaataaagcccaaggtgttggacacatctatgtattgcaccaaccatatgatgcacaattcaattatttatccagttgctagtctagactaaaagcttctggattgtaggaaaaaagactgctgcatagtttttttttaatggccatataaaatggaagcaactagtttatccatttgggtctccagatcttttccttctttaccatccaagtactaggaaactggagaaactctcatctgggtaccaaccaaagacacctcttgtatgaggggatgaaaaaacacaggatgactcatttcccttacactgagacagaagcagaattaaccactcttatcagcctaacacaattctgctctgaacatcctcaaatgcctcaaagacacccaggtgattgtgagggaatttccagtgaccctgggctgatggcccaatgataagccaggctagagagactcaggctgaagaccaatgcaacagaatagagagcccagaaataatgccaccctcctataaccatcagatttttgacaaagctgacaagggaaatgtgggaagaattctctctttaataaatggtgctggaataactacctagcactatgtagaagactgaaactagctcacttcattacagcatatacaaaaatcaactgaagataaacacttaaatgtaagcttaaaattataagaaacactgcatgaaaacctaggaaataccattctagacacagaaactggcaaagaattcatgaggaagctaccaaaagcaactgcaacagaagcaaaaattgacaaatgggacctatttaaactaaagcgcttcttcacagcaaaggaaactatcaacagaggaaaaagacaacctacagaataaaagaaaatttttgcaaactttgcctctgacaaaggtctaatatccagaatttattagaaacttaaacaagtttaaaagacaaaaccaaacgacctcattaaaaagtaggcaaaaaagatgaacactgcttttcaaaagaaaatatacatgtggctaagtacctgaaaaaaatgctcatcgctaatcacgggagaaattaaaagaaaaaccacatgtggctaagaagtacttgaaaaaaatgctcatcactaatcactagagaaattaaaagaaaaacaacaacgagatatcacttcacaccagtcagaatggctattttcaaaaagtcaaaaaataatagatgctggcaaggttgcagagaaaacggaatgcttatactctgctggtgggagtgtaaatagtttaacaactgtaaaaagcagtgtggcggttcctcacagaactaacaacagaattatcatttgacccagggatctcataattgggtatatacccaaagaaacataaattattatattataaagacacatccacatgcatgttcactgcagcactattcacaatagcaaagataaggacaggccctaaatacctatcagtggtagactgggtaaagaaaatatggtatggtcagatgcagtggttcacgcctgtaatcccagcactttgggaggccgaggcgggtggatcatgaggtcaggagatcgagaccatcctggctaacaaggtgaaaccccgtctctactaaaaatacaaaaaattagccgggcgcggtggcgggcgcctgtagtcccagctactcgggaggctgaggcaggagaatggcgtgaacccgggaagcggagcttgcagtgagccgagattgcgccactgcagtccgcagtccggcctgggcgacagagcgagactccgtctcaaaaaaaaaaaaaaaaaaaaaaaaattggccaggtgtggtaatgcccgcgtgtagtccaagctacttgggaacatgaggtaggagaaaattgcttgagccagggaggttgaggctaaagtaaaccaatatcatgccatggcactctagcctgggcaataagggagactctgtctccaaaaataaaatgaaataaaagatttagtcaaaataaaatatggtatataaacctcatggaatactctgtggccattaaaaaaaaaaatcatgtcctttgcaataacgtcaatgaagctggagaccatcattcttagaaaacaaatgcagaggcctggcgcagtggctcatgcctgtaatcccaccactttgggaggccaatgtaggttgatcacttgaggtcaggagttcgagaccagcctgcccaacatggagaaaagccatctctactaaaaatacagaattagctgggtgtggtgccatgtgcctgtaatcccagctactcaggaggctgaggcaggagaatcacttgaaactgggagacggaggttgtggtgagccgagatcacaccattgcactccagcctgggcaacaaaagtgaaactccgtctccaaaaaaaaagaaagaaagaaaaagaaaatactgtagaaacagaaaaccaaatgcatgtttttatttataagtaacagctaaataataagaacacacaaacacaaagaggagaacaacagacgctgcggcctagttgagggtggagggtggaagactaagagaatcagaaaacatacctgtttggtgctatgcttaatacctcagtgacaaaataatctgcacgcaaaacccccatgcaccaaaacaaactcatgtgtaccccaaaacaaaaataaaagctaaaagaaaaaattaaatccctgggtgggagagattgcaatgtaggtgagaggactgatttttgctacagatagttgtcctggtgcagctgtactctgatttattactgtgtgcacgcagacatatgagattatgaacagctgattcaaaatgctaggttggtggagaaaacagattgctgctgcagatttagtgtctgggggtggggatacgccaggagacttgtagagacttgtgggttcttggcaagaaacactaggatcaaaaacgccgtggtgaaggtcctgagggtggtgcctactcctgggaggagggtggacatgtcaatgtctagtgtgtgtgtttgtgagtgggtgggaatcctgtggtggcagctgtgggaaaagggggtctgtcatcagagctcctttcttctaagttttcagtcctctgtcaccctgggagaagacctggaatcacaggacaatgggcagtgtgacagcctgtgaccagacagcagagctcccattcccaaacacctagagttttattccaggccagacttctgtgatatctttttcctggcaccaaatctgtagagtttgctgaacattaaacaattctccaacaccaactcattgtctaacatttgaattctgacaccaccgagagtcaacacagaccctgattcagggctcagtcccacaacactgtcctcactgcagatgccaatcacaaaccccatgggcttatctatgcttctgagctactgtttaaaaactggggagtcccataacctccctgaagttcaataatttggtagagctactcacagaactcagcaaaccactgcagtgatgtttaacagtttaatatataagatgcagcccaggaaaagccaaatggaagaaatgcacagaacgaataaaagagatggggaaagatgaaacacacagataatcctggaaaatatttgtgattaataaaattctccatcttttgtgtgctccaggaacagtttatggaaagaaacactgttcccattatgacttagtgctctcttttcttatctatcacacaggcacacacacacactgcacattttctcctttttctcattaaaaaaatcagctgaatttgtcttcagcgctcaaaatatttcttcactttgtcacccaggctggagtgcagtggagcaatctcagctcactgcaacctctgccttccaggttcaagcaattctcctgcctcaccctcccaagtagctgggattataggcacccaccaacacacctggctaattttttttttttttttttgaaatggaatttcactcttgttgcccaggctagagtgcactggtgtgatctcggctcaccacaaactttcaagccatttcccaggatcaagccattctcctgcctcagcctcatgagtagctgggattacaggcatgcaccacaatacctgatttttctttttctttttttttttctgtagtagagatggggtttctccatgttggtcaggctggtctcgaactcccgacctcaggtgatctgcccacctcagcctcccaataatttttgtattttagtagagacaggatttcaccatgttggccaggctggtcttgaacacctgacctcaggtgatccgcctgtctcagcctcccaaagtgctgggtttacaggcatgagccaccacacttagcctaaaataaaatatcccttaatcgaactcttcttaagcttatctccctccctcaggctcctgaactttgagctaccctcagtctgagtcagcatacaaccccattttatgtccctcctaagaacatgctgatttcagggtaagacatcctctgatctaaaatatgactttttcactctccgtttgccattcacctcccacctcctttctaatcttgtttgctcctccctaaaaaagaaagcccttttctgcttacatctttgcaagccataaagatcttaaattagttggtattttctgctgttgcaattttttttggaattcatttttttaacataaattaatattttttattttacaaagtgtagaaagtgccacaaaacataacaacttcatcatcaataagaccctctaagtttcctttcatcttaacctcagctgcatctgcctgtggggccccagctttccagggctctgtagcttctctcaggataaagcctccttctatggctggggtgagcaggctgggacatgtgcaggggaggctccccagaaaaaaactgagtctttagtaacatcctgttgcaggcttaatatcagccttagcttggagtcactaggttcaagctttgatttccatgtcagagttattcacttggtttttgaaactaagtgttagaaaaatccagggaaattactcaaacacagtgtttacataagaaggaagtgcttactttttttttttttttttttgagacggagtcaccctgtggcccaggctggagttcaatggcatgatcttggctcactgcaacctctgcctccccggttcaagaccttcttgtgcctcagcctcccatgttgttgggaatacaggcgtatgccaccacacccggctaatttttgtatttttagtagagatggggtttcatcatgttgggcaggctggtctcaaactcctgacctcaagtgatccactcacctcggcctcccaaagtgctgagatgacaggcgtgagccactgcacctggctaaggtgcttgcatgtgatacctccataagaaaagtaaatatatctacttctttcagaaaatatatgtattattttattatttatcttaaaaataagtaggcctggtgcggcaaatcatgcttgtaatcccagcactttggagggccgaggcaggtagatcacgatgtcagaagatcacgaccattttggccaacatgttgaaaccccctctctacttaaaatacaaaagaattagctgggtgtggtggcacgtgcctgtaatcccagctactcaggaggctgaggcaggagaattgcttgaacccaggaggtggaggctgcagtaagccgagatcacgccactgcactccaacctgttgacagagcgagactctgtttcaaaaaaaaagtaaataaataaaataatgtagtaaaaaattagtcatatgggaacacttctagaaggtaccatgtttcatcacatataatttagcatttaactcagaactcaacaggatatagaactgagatattcactgtcacaaatttcccctgcaaaaagaggaactaatgtgttgacgaatctatgtaactcatcaattatctaccacattttcctgtggaaatatattcattgtctacagccaaaatggaagagagattttccctatttttttccttggtaactagcattcctggctaacatactgaaactccatctctactaaaaatacaaaaattagctgggcgtggtgtcgcgtgcccatagccccaactactccagaggctgaagcagaagaatgcttgaacctgagaggcggaggttgcagtgagccgagatctgacactgcactccagctctggcgacagagcgagactccgtctcaaaaaaaaaaaaataaaaataataaattgaggaacatggggtacacttgaggccttgcttgagacacatgtggaaaatgccagggaaaatcagtccgctgtggcgtgtgaaaataattaagtggcaggcaattagactgaagaagctctagtccctggatttctacctcaaaaaaaaaaaaatctaagctcatgtgcattttttgggaaattactacattaggggaaacaaaattcaggcttaagcaactataaactgccaattaaactgtaattacataaccaggaattttttttttttttttgagacggagtctcactgtcgcgcaggctggagtgcagtggcaagatctcagctcactgcaacatccacctccggagttcaagcgattctctcacttctgcctcccgagaagctgtgattacagacatctgtcatcacacccagctaatttttgcatttttagtagacatggggtttccccatttgggccaggcttatcttgaagtcctgacctcaagttatccgcctgcctcggcctcccaaagtgctgggattacaggcgtgaacgactgcgcccggccccataaattttgaatagcagaaaacagaaactgtgaactccacggaccaaagctcttcccattcatgaacctgcaccccgagtcaggattctcccctgacgaccctctggtggtccctgcacattctgggagagacgggaggctgcggttgcagagctgcccacggagcgctccaggccagagcagtcactacgcagggaagacacaggacgccagggggcccggctgtcagcgtagccgccaaattatggctgaacgggactgaggccgagctgggcaaggagaactcagggtgcagattgtggagctgactgcgcagaggcctgagtcccgccacagccacttcccaccggttccaaccagcctatccccctctctcgggatgtcggaccggcactctcaccatttctaggcttccaggggctcccgggcgtcttagctgtggatctcccaatacctgcaggacacagggccacagaggctgggcctctaggagcagaggacacacagcagtgaagacaagacctggagctccggctgcagagacaaaggccccgcaaaacccggaagccttccgcttcactctggctgcgtgcctgattggacggcttccagcccagcgtccctgattggataatgcttaaatccccgccccctcaggccctgagtgacagaagatatgatcagatgctgggttaagtgaacaaagagtgccagcctaagcagctggcttttcaaacagtgcttcctccctgagctgagccaggcccaccccagagcatgggaatattttatctcttgtttactctctttcttgttgaatgtattaaaaaggtgaacagaagtattttgctgtcattaataatacataaaatttttgttcaacagaaaatcaacttttactttggtaatggtaaaatctattaaagctaattttaataaaaccttataaataaatcaaatttgtcatttttgagcactccagatttacatatatattttgtaatatctcgtaattttaaaaaactatttatattttatttttgtccacattctttttattttttcaatttgaaacaatctttaatttccaacagctataggagatagaaatcatttagaggcaggcacggatagttcacgctggtaattccaacactttgggaggccaaggtgagcagatcacttgaggtcaggagttcaagacaagcctagccaacatggtgaaaccccatctctaataataactaataaataataataataactaataatataaaaagttacctgggtgtgggggtgcacatctgtagtcccagctacaccggaggctgaggcaggagaatcacttgaagccaggaggcggaggttgtgtaacagcccaaggggtttattttaccctttgcctagacagagccgattcatcaagacaggggaatttgtggaggaaaagtcacatattaaatctgaactcaattgaatgtggacacaaacaattgtcaccaagtcccagaacaggttgtgtgagcccctgaggtgttcatccagcgctgtattgaagaaatctctatttcaatctattcctatatattagttgttgaaaaacaatagacaatcacaaaaaaaggttgacctttttgtgttccttgaggcaagtcgtgaagggctctcatcactgggccttatgccaaacaactcgttacaaaagagctaaggtcccagaccgccctgaagcttcataagacctctccttgtctgtgtacgatggacgggtggctgactctagagctgtggctgttgcctccctctctggtggtgaatcccccatagtctggtgagggaaaatatatatatatatatatatatatatatatatatatcttttcccatttcctcgtcttattaagattggcttattacatcaatctgcttattatatttatttgcttattatatcatttgcttattatattattactttattatgtctgcattgccatttacgtgggataaaagttgtttacccttaatggtattgtgtgtgtgtctttgtttctcccctctcacatttgcctcacagaacatttttggcatcacaaataggatttgaaaacaaaagtgtacccctttttgactagaaggacagggctggagggctcagggacttcccatatcctgggatgggaactcccccagttctccctcttggtgattaaatggtcaaggggaactggtttttgtgggaattgggaatctaaattagtgcagtttaaacctttgactgtgcgggaagtgctgcgggggattccagtcagcaaaggagatgctgagggatctcccggagtggatggtgtttgcttactgcttataagttaatgtatcgtgataggggctggttgctacaagataaatgtaagcggaaaaggaaaatgctaatctgacttccagactggcccaatgccagtcaatgtcttgactgataaagctcaaagctatcagcctatcgctgaaaaaagcagctgtccaggtggcccagtcaggataaaactgaagaactagtcagccggggcttcgagcaggtaaaaacccagttcctatttcaaaaatgggaaattaaccctagtaaaattcaaggacctgcacaaagtataaaattccttggcattttatggaatgcaaataaatagtccattttaccaaaggctaaggctaaaatactagattttgcaacccctaccactaatgtactggcttgtttggtttctggagacatcatattccccacttgggtaacattttacaacctctgcatgcagccactagaaaacgctatgactttcactggggagagaaagagagcatggcctttgaacaagctaaacaagcagtgcaactggccctggatctatggcccatacgggatgggccagtagaactgcaagtaactgtcctagatcaatatgctaattggagccttgggcagaaacaagatgggaagagggtacttttcgggatttggacccagaaaccaccagagggaggaaaagcttatacctctttcaagaagcaactgttagcttgctattgagctttgctggaaatagaacacctatgcttcaaccatgatgtttttatgagacctgaaattcctattatgacttgagacatgagttcccccaaaacccaccagatagggcacacccaagaaagtagcatcatataatggaaatggcacatacaaaaccagcctaagccaaaaccaaagagggtatcactttcacatgaggatggacaaaacttgccagctcaggaaacactgaacgagtcctgcagatagagaggtaaacacccccctccccaaccgcccatcaaatgggatcagaaacatacttggtttactgatggacccaccaaatacattggtgggacccaatgctggaaggctgtggcttataatcctcttaaatacataagcatttctgatgaaggaaggagtgggagcattcagttagctgaactggcagccatcctctgagctattcaggaggagaccagagggatttgtcacttgtatacgaactcttgctcagtagcaaatggtcttaccacatggatgccccagtggcaatgaaacaaatggctaattgggaataaagaggtttggcgagaacaatgctggtaaggtatctgaatcctggtgcacaacacataccactgtgttccatattgtttgttgttgttgttggttttttcctagccctgtcaccaaactgaagtgcagtggtgcaatctcagctcactacaacctctaccgcccgagttcatgccattctcctgcctcagcctaccaagtagctgggattacaggcacgggctgccacgcccagctaatttttttttttttttagactcagtctcactctgtcgctagaatggagtgcagtggcgtgatctgggctcaccgcaacatccacgtcccacgttcaagtgattctcctgactcagcctcccgagtagctgggaatacaggtgcgcaccaccatgcccagctaatttttgtatttttagtaaagacggggttcatcatgttggccaggatggtctcaatctcttgacctcatgatccacccacctctgcctcccaaagtgctgggattacaggcatgaaccactgtgcccggccctgttttccatgttgatgttcatgcatctctgctttctcttgacagactatttaatcagcaggaagatcaacaggcaaaaatttccaccataactgcgatcttgaatgtgggtaaatggattacaacatgttcaagccttgcaatgagaggcattatagtgtatggtggtataactgatagggattaccagggagagttaaaggtcattttatacaataacactccagattcttttgctataaaaccacagatgcttgttgctcaattgttagtggtaccttgtgaacaattaacccctgaggaaatctttgtccaacagagtctacatacagaactgggggattcagatcccctggtacaggtagcttaaatcctggagtcaaaatatgggtacggcgtccctcagatcccaaccctaaggctagtgaccttgtagctatgaaagcagaaaaggaaggcatagtacaatttcctaaagatgaaaaacaatatcatttcccctctgtttttgttattacagggaataacctatctactaatggtcagcacctgtgtctttgtgtctgaggccaagaataaattcatcaactttttagccaccgctgcaacagaagccaaccacaatcaatgttggctatacgtcgagttgcaggaggatgccaaaaatggctaccttggagaatcatccctgacaacatttctgaatggctatattgttaccaatgggccacaacaacaacacttgcaatccaacctgggcttcctttgaccacactaagcgatctatctttgccaagtcagacaaaaggcgaactcctccctcaccttgcatcaaaagccttggtattctgcccaatattcctggaatggtatatactacaaacctgctgtgctggtggctggattccatacaacctctgctttgtctggaggccttaaatggatcctctaatgttactctggggtttctccagtcacgtgtcaacacatactccaaatcaacaacattatgcccaatgaaacacaatctctttcctatgttaataagagattagtacactatgattacagtagctccattgctgtcccctggggggccctctgggtatgcagatcctatgggtggcgatacgtgcccctactttggatggggagatgcacttgggggtggacattaattccattcactatccgggaaaatactcccctctccagtaatctagatgcttagaaacattgctagttacaaatgtgctggactccctggtggtggtaccctatcacagtattctcccctgccactggtacaatcttgcttcaccaacaaattataatacttagcttacctgtagaaaatgctcttaatgctagtagcactcgacttatgttgttaccagatgaatttgctcagctgcatactgttgtgttgcaaaatcaaatggcattagatatgcttaccacagcccaaggaggggtttgcgccttactgcatactggatgttgtgtgtatattcctggcaagtctcacaatattactctgtttgcaatgccatgttgggtctaatttttattaattgtgcttctaattctcctgtgcttaccctgtatctgtaatctatatcaactataccttcccgatgtatctgtgagggtattttaatacaattgagtatccaattgaggccgaatgtagtggaaaagttaaatattaaatttgaactcaattgaatgtggacacaaacaatggtcaccaagtctcagaacagattatgtgagcccctttaggcattcatccggcgctgtttcagagaaatttctacttcaatctattcctatacattagttattgaaaaacaatagccaatcacaaaaacaggttaacctttttacaggtgtgagccaccatgcctggccttggatggggtttttgtggttacttttttgttgttgatgctgttgttcctttctgtttgtttttctttcaatggtcaggtctgtcttctgtagggctgctgcagtttgctgggggttcacttcaggccctattcatccggttcactcccgtgcctggagatgtcactcaaggaggttggagaacagcaaagaagagtctgctccttcctctgtgatctctgacctcaagaggcaccaacctgatgccagtaggatcactcctgtatagggtgtctgacaacccctgttgaagtgtcaccagttgggtggcatggggagcagaacccatttaatgaagcactttgactgttccttggtggaggggggtgttttgctggggggaaacccactcatctgggctgctcgaattcctcagaactagcaggaggaaaggctaagtctgctggtccacagagactgcagcctcccctccccctaggggctcaggcccagggagatcagagttatgtccctgagcccctggctggagatgttggagttcctgcagggaggccctgaccagtgaggagagatgggtcagggtcaggcctgaagagacattctggccacagtctgccacagcccatgtgttgggctgtgggggacacctcttgagaccaagctgtccagttttcctggatctagcagaggaaaagtgaggccaggagctatagagatggctgcttccctttccccatccagggaccttagcctgttaggcagtttcgagtcccagtgctggctgctgtccctccctcaaggagctcaaacagcttagacagcagccaactgcaacggtggtgctggtctcccccaccgtgggaactcggcaggcttaagcagattctacctgacaggctgttcataatctgctcagctccagggctgtgtcaggcataataagttcctcttcaaagggtaacttccttgttgtttgttctcaaaatcaacttccttataccttcccgctcctagctacctgctatgtaaacatctcttctccccagtcgcaatccgtaatccacatctcttccttatttggaagaagtcctcctcactcctagttacctgctctgtaaacaaccttcctgccagtctcgatttaaaatagccgtcgagttagctccagccaatgggggcagcacgcagaagtagggactgtgttagggataaaaactccttccctcccttgtatgctgtgctctcacaacagccagagacatgactggcacccttctgcagaagtaaatttgccttgccttgccttgctgagaaattccttgttttctttgcgactctgagctcttgtttccaacagttgggaccttaggctccagtggcgtgggttcatgagtggaatcttctaatctgtgggttgcatagttccatggaaaaagcacagtttcccaggatgggtagcaggctcactcaccgcctcccttggctattgggcaagggctccccaggcccatgtgggtgtcaggtgggctgccacaccacactgctcttcctctccatggatcacgccatccacctagtcagttctgatgagaggacctggatacctcaggttatggtgcaggattcacatactattatggttcttttctatgggatgctgcttctagtcagccatcttggccctgccaccaccaatttttctttgaaaggctaatagaattcagctgtgaatccacctggttctgaacattttttttggttggcaattttttgaaattatttcaatctcacttcttgttattagtctgttcagagttgttgttttttaacctaggagggttgtacatttccaggaatttattcatctcctttaggttttctaatttgtgcacataaaggtgttcacagtagccctgaatgatcttttgtatttctctggcattggttgcaatatcttctgtttcatttctaattgagcttatttggatcttatctcttcttggttaatgctgttaatggtctatcaattttgtgtatcttttctaagagccagcttttcattgcatttatcatttggattttttgttgttgttgttgtttcagtttcatttagctctgctctgatctttgttatttcttttcttctgctgggtttgggttttcttgtttctctagttccttgaggtgttatcttacattgtcagcttatgctctttcagactttttcacagaggaatttgatgctatgaactttcctttcagcaccacttctactgtatcccagacattttgatcggttgtgccattattaatgttcagttcaaagaatttttaaattttaatcttgatttcatccaatgatcattcagaaacagattgatcataaatttaattttttgtttaatttccttgtatttatttaatttctaaaatgtatttaattttcatatatttgcatggttttgatagttcatttagagttgattttcaattttattccactgcagtctgagagtagttgatataatttgcattgtcttaaatttattgtgacttgttttgtggcctatcatgtgtctatcttggagaatgttccatgtgctgatgaataaattgtatattctgcaggtgttgggtagaatgttctgtaaatatttgtcaagtccatttgttctagagtatagtttaaggccaccgtgtttttttgtttttattgttgactttgtcttgatgacttgtctagtgctgtcagtagagtattgaagttccccattattattgtgttgccatttatctcgtttcctaggtcttgcagtaattgctttatgaatttgggagctccagtgttaggtgcatatatatttaggattgttacattttcctgttgactagtacttttatcattatataatgtccctctttgtgttttttattttttacctgtttttgctttaaagcctgttttgtctgatgtaagaatggctactactgcttgcttttggggtacatttgcatggactatctttttccaaacctttaccttaagtttatgtgagtccttatgtgtcggttgagtctcttgaagacagcagatattttgtgggtaaactcttatctattctgccattctgtatgttttaagtggaccatttaggccatttacattcaatgttagtattgaggtgagaaggactattctattcattgtgccagtagtttcctgaataccttttatattgtgttattgttttataggccttgtgagatttatgccttaaggaggttctatttcagtgtattttgaggttttgtttcaagacatagaaccctttttatcagttcttatagtggcggcttgttagtagtgaattctctcagtatttgtttgtctggaaaagactgtatctttccttcatttatgaagcttagtttcactgaatacaaaatttgggctgatacttgtcttgtttaaggaggctaaacataggaccccaatcccttctagcttgtagggattctgttgagaaatctgctgataatctgatatgtttttctttataggttacttgaggcttttgtctcacagctcttaaaaatctttcctttatattgacttcagataacctgatgactgtgtgcctaggtgatgatcttcttgtgatgaatttccttggtgttctttgaacttcttgtatttggatgtctagatctctagcaagtccaggacagttttcctcaattacttcctcaaataagttttccaaacatttaggtttcacttcttccctgggaacaccaattattcttaggttaggttgtttccataattccaagcttcttggaggtttggttcattttttaaattcttttttgtcttcgttagattgggttaattcaaaagccttgtctttgagctctgaagttctttcttttacttgtttggatctatttttgtaattttctactatgttttgcatttctctaagtgtgcctttcatttccagaagttgtgattttttttttatttatgctatctatttctctggtaattgttttcgtccatatcctgtatttaaaaaaaattctttcagttagtatttatctttctctggtgcctctttaagtggcttaataatggaccttgtgaattctttttctggcaattcagagatttcttcttggtttgcatccattgctagggagctagtatggtctttcaaaggtgttaaaaaatccttgctttgttgttaccagattgtttttttggttccttctcatttgggttttctatgtcagaggaaagatctgaggctcaaggggtgctgttcagattcttttgtttcatggggtattcccttgatgtgatggtctccccttttcccttgggatggggcttcttgagagccagagtgcagggattgttattgctcttctgggtttaaccacccagtggagctactggtctctgggctggtactggggagtgtctgcaaagagtcctgtgatgtgatctgtcttcaggtttctcagccatggattctaccacctgctctggtagaagcagcaggggagtaaagtggactttgtgagggtcgttggttgtagttctgtttagtgcactggtttttttttttttttcttttgaatgctagttgttctagcagtgaagttgtcacgtggaaagactgaggaggacttctggttagccaggatgttacaggtgatggaattagctgttgttttctcctttattggagtggggattttttgtttgtttgtttgtttgtttgttttttgagacagagttttgctcttgttgcccaggctggagtgcaatggtgtgatctcggctcaccacaatctctgcctcccaggttcaacggattctcgtgcctcagcctcttaagaagctgagattacaggcatgcaagaccaggcctgtccaattttgtatttttagtagaaactggatgcagtttctctatgttggtcaggggggtctggaactcctgacctcacgtgatccgcctgcctcagcctcccaaaatgctgggattacaggtgtgagccacaccacctggatggggttgttctttgatgagttgctgcaatggcttgagttggttgacctccaacctggaggtgggattttcaatagagcatcagctgtcgtagtatgggggggatgcaagcttgccatcaggtcacctggataagtattcaggtttctcaggcaatgggtgggaacatagagctcccaagagagtatgtcttttgtcttcagctaccagggtgggtagagtaagaccatcaggtgagggcagggttagacatgtctgagctcagactctccttgggtggggcttgctgcagctgctgtggggttgggagtatggttctcaggccaatggagttatgtttccagggggattatggctgcctctgctgtatcatacaggtcaggatggaagtgaaggaaagccagcagtgacaggcctcactcagctcccatgaagccagcaaggccagtttcactcacaccctacccaccaacagcaccaagtttataaccagtccgtgagcagtactgagatcttgccccaggctataagcctccccattgagaaagcaacctgggctttcaggccccacccctcaccacctgccatggcttctgtgcccatatctgtgcttcccattcactgtccccgtgccaattttgccaaggaacattgacactaggtcaaaattcttacagaatttagctggaagtttccttctccctgtggcccttccccaattccactggcagcctgtcccaaggaccactgtgagataaagtcagaaacggcttccctgaggaccaagagtgcctattgggctattcccactgcttcttctgctttcatattttgcttggctctctaagttcatttcagccctaggtgaggctaaatccttctctggtaatctggattttcaggttttgagtatgtgtgtttagaggtgaatgttccatctcttacacttttggcacttgctatttttcagtcatctcgcagaggttgcagtggcaagccacttctttcaaagagtctgtgcattcttttggttttcctggtatgttcctatggtagttcttggagcaaaagttcatgatgaaagtctccacatgctgttcagtccatccaagtgggagatagaaggtagttctgtctcctagccaccatttgtttttcttttgccttctgagatagaaatattgattgactcttcatcacagatacaaaaaaaaaaaaaaaagatcagtgagcattctttctttattgttttaaacagcaatctactttttcttcgggctactgatttaatttctcattatacatttatttatttatttatctgtttcttactgcctgtgctcaccactagaccagctgcaaaaaattcaactacagaaatataaggtaagtatttcataaatgattctcattaactataaatccacaaaaatttcatgttcacattcatctgactggcctcatttggccttctacagaatgtttgaagtttgattaaaaataatctactgataaatatttattgatagaacactgaaaggtgaagtctactggtgaaaacattgttccttcattaccagaaatgaagtagatacatttatttcttgacttactattatgcttcattagtgtgtgtttatttttattcagtaccatgctatttgctttctgtagctgttttttgagacagatttcactctgttgcccagggtggagtgcagtggctttattgtggctcactgcagcctcaacctcacaggatctagggatcctcccacctcagcatctcaagtagcagaaactatgggtttgtgccattacactctgctaatttttgtattttttgtagagatggtgttttgttatgttgctcaggctggtctagaactcctgggctcaagcaacccaacttggcctcccatagtgccaggatcacaggtgtgagccactgcacctggccttactgtagctttgtaatatattcagagactaggtagtgtaatgcctatagctttgttgtttttcctcactattgcttaggttattcttggtctttcatgaattgataaagatttgataattactttttaaattctgagaaaaatataattggaatttttataaggattgcattaaatctatagatcactttgggtagtatggacattttcacaatattaattctttcaattcatgagcatggtgtatttttcaattttttagtgccttcaatttatttaattaatgttttaagagtttttagtgaacagatcttttgcctctttgaataaatttatttctgtgtattttattctttttgatgcttttgtaaatgagattactaatctcaatgcctgtctacacatctattcaaattcaacagatttagagatgaaaccaaatacatgtgaaaatgcaggagaggaaagaaattcaaagttttatagttttgtaaaatacaggtgcccaatttagcatcctgtgtcatgccctgtggtgacaagcatcgcattaagcttaaacttaagctcaaattgacttcttatttgggataacccaaagatagagaaactcatcatcctgattttacacaggtggagactgctgcttagaataaatgaatatacagaatcacatggctggtacatggtaacctggaacttctagaacaaaccatctgagcctgaacttgaaatgagctgggcagcttcttaccatctgtctatgaatagtccagagataccagagggtgccctttgagcctttggtgaataggtgaaaacttcaaatgttgatactcaggaggaaggagttagattgacccaacacttgatggaacacttatttttaacttaatgcagccataaaagtgtttataacacttggggctttgagttcttcaattaaggaagaatttctatagagtatacttttccctataaaatgtatttagccattgataactctatgtagctctgtgaaatatgtgcttattagacagatcaggtgttttggctatgaataagatgaataattgtgtttgaaataaaatatatttataaataattttgattctgaatatttaaaaactattaactactgtttgaataagtctttgtccaaaacatatatatatatacattttataaaatatatagaatatatgtatatatataaaatacaaacatagataatcatatgtaatatagatggtaatataactgtaccttctgtggctattatgagcttcactggtcaccagctctaggatatggggcatcaggtactcaagagtggcagcaagaaacgtaagcatggaagagtccaggcactgggcacagcagatctcccacaagaggtgtccaaacatatcatggagaattgcagctctgctcttgctaagaaggtgagtctacttttatttatttatttatttttagacgaagtcttgctctgtcgcccaggtgggagtgcagtggtgctatcttggctcactgcaagcttcacctcctgggttctagcgattctcctgcctaagcctcccgagtagctcggactacaggtgtgtgccgccactctcagctaatttttttgtatttttagtatagacggggtttcaccatgttggccaggctggtctcgatatcctgacctggtgatctgcctgcctcgggctcccaaagtgtttggattacaggcatgagccactgcacctggcctctttttttttttttgtgaccgagtttcgctcttgttgcccaggctggaatgcaatggtgcgatcttggctcacctcaacatccgcctcccaggttcaagcgattctcctgcctcagccgcccaagtagctgggtaggctggtcttgaactcccaacctcaggtgatctgccggcctcggcctcccaacctgcggagattacaggtgtaagccaccgcgccctgcttttttttttttttttttttagacagaatctcactctgtcgcccaggctggagtgatgtggcaccagctcagctcactccaacctctgcctcctgggttcaagtgattctcctggctcagtctcctgagtagctgggtagctgggattacaggcgtgcgccaccacactcagctaatttttgtatttttagttgagacgagttttcaccatgttggtcaggctggtctaggactctcaacctcaggtgattcgcctgcctcccaaagtgctgggaatacaggcatgagccaccgcacccggctcaccaagacctttaaatgccactggtgtcaacttggccatgataaagcctgggcctagaaatgcccatgattaaaatctggtcactctaatgactgaaccctctttttaaagaaactgtagctattcagttgactttttgttgtagacaaaaatgtgtcatcaatagaatattttgccctgtctagaggacaccgctacagattatcagactctagccagtactctttgagtgcttttacaactttttgtaagttttaggtcactgaaagacattcacaatgtcttgtccagtagagtgtcaattgtttcttctcttacagtacaataatatgagtctccctccattaacatatttatttaattatttccaatttatattgcttttgctgtacatttgatttttttttttttttttgagatggagtctctccttgttaccctggttggagtacagtggcacgatctcagctcactgcaacctccatctcctgggttcaagtgattcttctgcctcagcctcctgagtagctgggacaacaggtgcccaccaccacgcctggctaatttttgtatttttagtagagaccaggtttcaccatattggtcagggtggtctcgaactcctgacctcgtgatctgcctgccttggcctcccaaagttttgggattacaggcgtgagccaccgcgcctggccatttgactcttttttgtactggctctcatatcggctgattcctcagatgttaaataaatattttaatatgtgttcccatctttatgagtgtcacgaatttataatttttttaaaattatgttttaagcactttttatgtcacactgatatgcccaatggatttatctaccaaaagcatccaaacttctatgacagagggttacacagttgaacctgggtgtttttatttgaatatctaggtgactaaagcttcagtagaactttgtggactctgttttcattttagtttcaattttcctttcagctaacttagtgtttctgtgtttttctgctgcatttagagcatattacctagtctttaccattggcaacagtggcttgaagtttgtttataaaattatgtttatcgagataaaattcacataatatcaaattcaatatattaattattttcaggtttacacttcagtatctttttgtgtattcacaatgctttacaatcattagcaataggtaattttagaacagtgtaattacccaaaaaagaaaccccacacccatcaagcagccactttcaattttccccactggcctctggcaaacattaatccactttctgtttcaaaggatttgcctgttttgggaattttatacaaatggattcaaaaaatacatgaccctttttgtatagctttttccatcaagcgtaatgtctttaatatgtatccatgttgtgtgccatattggcacatcattcctttttctggcggaatactattgccttgtatactacatcacatttgtctatctagtcctccatggataggcatttgcactgctctcaccttttggccataacaaataatatttctacggacacgcatatacttgtttttgtgtggacctattttgatttccgttgagtatatactcagaagtggaattgctaagccatgtggtaactctatgctaacctcaggaggaactgccaaaatgttttccaaaactgctgcctaattttgccactgcaccagcactgtatgaaggtttcaatttccccacatcttcacccacactgatctgtcttctgaaatatacctgtaccagcaggtgtgaggtgatatatcactgtggttttgacttgcatctttctagtgaataaagatgttgtgcatcttttcatgtgctcattggccacttgtacagaataaaaatcttggagccactggtccagattatgagtctcaaacacatgttacaaacagatttttgatgctgcacaagaaatagcactcagcaaggcaaatttacttctatagaagggttcacctagtaaattaagcaatgacaagggcgcatagaacaaaggaagcaggagtttttattatctccggtgcagcttctacctgtgtctttcccctattgcttaggtttggaccacacagtctaaactagtcctgattggttaaatacttcaaactttttagatatggtaatcatgtaagggaggtaagagagaatggaggtccattgggggggaactaggaaagcaacctgttccctaataaggaaaataatgcagattgggacttagattgtagcaagttcatgcatgtctaggcatagttaggtaagttggggcacagttgaggtaaggaatagttggaattatagaatagagaatggggaaactggataagctatttgaagagggaacataactgtgtcaaacacaaacaccatggaatgacgataatgttgtacatagtaatctggtaattctgttattatccaatgaagaacagtatcttaaatcttttttctttgtattgtttttgctgtccaatttgccaatcacatgcatagaaaaaatggtatttgtcagtgtatttcctatccaggacaagatgttggaggacccaatgtatttgggagcttgtagtctcaactgtgcccacctggagttcatggggctgataatgatggctggaagacactcaagaggcagatggtggtaatgtacacacctctgcccactctgtgaacatagaaaacatgtttgcatgcactatcactgaggaaatgcttgaaattaaaagaagtcattgtctgtgaagctgctttggagaatatgaccaagatgttggctatagccaggtgcttgagaatcaaatctgtggactttaatatccacctggtataacaaagtggcaaaaaaataaattccccaataatccaactgttgtctgagaaaagaagattattcctatttccaaattcctggaggccattcattattttccaattactaatatttttattcggagtgagaatattctgcataggcacataaggtctgttttattgtggcaactaaaaaggattattgttcacataccactgttttcaacttataattttgtttttaaattctacttttctttcactaagatgtttttctattatctctatatatacatatatatacacacacacataaattcataaacacacacacatatatgtatatataaattatttgcatttagcctgtgctttttaaaataaattccagtggttgacatctagctcacatgttgtcaggcattttccattttagtaatttaattttcatctatattatttcattgaaatacacttgaatcaaatatgaaactttaatatgaaagattccattggcttttcttgcaaaaacctttaatatgaaagatgccattggctttgctttattattataactatatatagtgtgataactttatatatatatagcattataaaactactatatttgtgtgttacatataatttttacaacaactctattaagtggtttattattctgattttacaggtgaagagagcttagacaaaaatagaaaaaatgacatttccaaaattaccttcttgtaggaggcagtttcaggagttgaagatgcttttaactattatgctgtctcaatatcagatatatttttttaaaaaatccacgtattttaaaaacatttctgtatctcttgttagttttttaaagaatgtttgtacatatttatttaaaattgcaatatgaaatattaaaatttaaatatgattgcataatttattggcaaatatctataatgattcaaagattcaagtagaatattaatgttctgatttagcatcatcttaagtggaatttatcgaatgcaaaaattatttcctcttggaattaaaacagaagattttttcaacttaaccaagaaggagacataatggaatggctattaagaaaaggagcttgaggctgggcactgtggctcacacctgtaatcccagaactttgggaggctgaggtgggtggatcacctgaggtcaggagttcaagaccagcctggccaccaggcaaaaaccttgtctctactaaaaatacaaaaattgggccaggtgtggtggctcacgcctgtattcccagtactttgggagcccgaggcaggcagatcacaaggtcaggagttcgagaccatcctggttagtatggtgaaacctggtctctattaaaaatacaacaattagccgggcatggtggcatgcacttataatcccaggtactccggaggctatggcaggaaaattgctggaagctgggatgcagaggttgcagtgagccaagatcaggccgctgcacctcagcctgggcaacaagagcaaaactccgtctaagaaaataatatatctctctctatatatatttatatctatctatatctatatatttatatctatctatatctatatttatatctatctatatctatatttatatctatatctatatatttatatatctatatctatatatgtttatatacgtatatctatatatttatatgtatctatagctgtatatttatatatctatatctatatatgcatatatctatatctatatatttatatatctatatctatgtatatttatatatatatctatatatatttatatatctatatctatatatttatacatctatatctatatatatttatatatctatatctatatatatttatatatatctacatatatctatctatatctatatctatatatatctacctatcaagtaccatgctcactacttgcctgatgaaataatgtgtacaccaaaccccagtgacatgcaatttacccatttcacaaacctgcacatggacccttgatcctaaaatagaaattggaagaaaacagcacaaataaaataagattcagaaattgagtatataaaacaacaacgattttaaaaacagctttcttgcttttctaaaatatggatgttaatagatgatctggatcttcagccctcatcttggaccatgaagaatggaaaacgaatgtcaggggtgatggagcagagacatccctaaaggcttcctgaagctgccatgctggcccaggtatgcctaactccccagtttttatgtgaaaaaaaaataatttacgtgttttaagtcagtatgaatagatctcaattattaatagctgaataaaggaaaatgagctgttgaatatgaaaaaaaaaagcgatattttgaaaaatttgctccagttacaatttaccaataacaattacagctctttgccaggtgtggtggctccctcctgtaatttcaacactttgggaaaccgaagcgggcagatcacctgaggtcaggagtttgagaccaacctggccaacatggcaaaacaccgtctctactgaaaacacaaaaattagtcaggtgtgatggtgcatgcccgtaatctcagctacttgggaggcagaggcaggagcatagcttgaacctgaaaggtggagattgcaatgagccgagatcatgccactgcactccagcctgggtgacagagtgggactccatctcaaaacagaaacaaacaaacaagaaaaactgttacagctctctagtgttcccagagaaatgaaggagtttggaacaggcttttctcatctatgatttctgaagaaagaaagaggctcacatggagagagcagaaaatgctgagtcttatatacgaagaacagacagtgaagtcagtgtgtctttctgggttctgcgcttccttaagatgatcctctgctaaaaagcaaactttttgtgaatcttcaaattcctgagcaaaactattctttaatatttaatcaggaaatgtgattatataaaaagctggaggccaggcacggtggttcacacttgtaatcctagcactttgggaggccgaggcagacgaatcacctgaggtcaggagttcgagaacagcctgaccaacatggagaaaccccgtctctactaaaaacacaaacaattagctgagcatggtggtggatgcctgtaatcccagttacttgggaggctgaggcaggagacttgcttgaacccaggaggcggatgcagtgagcggagatcacgccattgcattccagcctcggcaacaagagcgaaactccatctcaacaaaaaacaaaaacaaacacaaacaaaaaaagcttgagtagaatatgtgaaaggttacagtgcaaataaataactttgaatttaaatattgatataaacataaacatataaacataaatggggcaaatatgtgcaatttacagagatgtatctcaaagagttattctcacacagaaaaacaccaactttatatacttgagagataaattctacttattaaatagttgataaactgatgctatctagactgttcgagagttttaatgtagtcaatcttcccgctaatgtgtaagtgttcataagagggatatgagaactttgcttaagagttctcatatatgagacacatatagaatattacagacatatagaacatataagtataatgtaaaaattttaaatattagtagccattgtgtcagcgtactaaaacatataattatattatgatccagtgtactttatgccagaaatggaagtgagatttaccatttggaaatccactaacaaattagtcaaataattgaaaccaatagaatgtcatgtttcatgttcatagatataaataaagacattaccagaattctacagaaaagtttatatatatttatatatatacttaagatatatatatatatatattttttttttttttttgagatggagtctcactctgttgcccaggctggagtgcagtggtgtgatcttggctcactgcaacctttgcctcccaggttcaagcaattattctgcctcagcctcctgtatagctgggactacagatgtgtgccaccacacccagctaatttttgtatttttagtagagacagggtttcaccatattggccaggtttgtctcgaactcctgacctggtgatctgcccacctcagcctcctaaagtgctgggattacaggcataagcaactgtgccaggcctagaaaatcatatttttaaaaaattagtaaggatttagcataaagtatttctgaaaaatatgaataacagatttgtacaagtaaaagtagtggcaatatatgtttgaaaaggatgattcaacagtattggatcaatgatcttttaatcagtttaaaaattgagtttgaatgcaacagagacatcatcttattgtgttctgaaaatagaaattttgctgcaaagaagaataaatgaataaagatattcataaaaagcataaaaaaaaagtgggctgggtgcagtggctcacacctgtaattccagcactttgagaggctgaggtgggtggatcaccaatggtctggagttggataccagctgaccaacatggtgaaatcccacctctactaaaaatacaaaacattagccgggtgtggtggtgcatgcctgtaatcccagctactttcgaggctgaggtaggagaattgcttgaacccgggaggtggagtttgcagtaagccgagatctcaccattgcactccagcctggccaaaaagagcaaaaagtgtgtctcaaaaaaaagtaaaaataaaaaagaaaagtgaagtgacatcttctatgatgtgttataaggaattgaaaagttaaataatgtagttttaatttatgaacagatttagagaccaatggaatataaaattcaaaaatagcatgaaatatatatgaaatgtagtgtataacagatgcagcagtagtgaaattgatgtgaggtcaatgtgtctccctggagactaaagcccacatatatgcagtgaggaccttgtctcccaatgttttatttttgcacatctgatgttttcacatgtgcagggaagaggtttaatatttgattgtctttggctatggtctgatggatcagtctctcctgactcaatacacactgtaacctgttctcagagttcacagtatgtctcttggtgaacgtaggtgttactactgtctgcaaaggttgaccatctacaacagacactcttgctctgtttgggaataggtacttattgtttcagtagttattttcagttggtaaattttctgggggactcccccatgcccttgtcccacatgaggtaattctcttaaagcagttcaggaagaacaactttgcgtagactctggaatgggctgcttcaaagtaggatactccacataacctatattctaatatgcaaccaacagaagacagtacacttttcctttttctttttttttaaaaaaaacttttggagaagataggcaaggcatggtgactcatgccaataatcccaggactttgggaggccatgacaagagtatcacttgaggccaggagtttgagattaggctgggcaacatagggagactttgtctctataaaaaaaaaaaaaaagaaattaatagggcatgttgacatgcaactatagtccctcctactcaggagtccaaggcaggaagatcacctgagttcttcctatgtaaatattaaaggtccagactgtgaacagatctgaagtgaggctacagtgagctataatcacaccactgcactccagcctgagtgacaaagatcttgtttataaaaaaaaaacttgaaacaaataaagattctttgttataacaaataaaactaatcttaagaggatgtgctataatgtatattaacagatgttttgtgcctatactgaaacttttgtttgtttgtttttaagacagaatctcactctgtcacctaggctggagtgcagtggtgtgatctcacctcactgcaacctctgcctcccaggttcagctgtaatcccagccactcaggaggctgaggcaggagaaataacatggtgaaagtaccaataaacatggtgaaataccacctctactaaaaatacaaaaattagcctggcatggtggcatatgcctgaagtcccagcttcttgggaggctgaggcagagggatcacttgaacccgggaggtgtaggttgcagtgatccaagattgcattactgaactccagcctgggggatggagtgaggctcttgtccttaaaaaaaaaaaaaaaatactttaatgaaagaaatcagaaggagcaaaaagtagaaagatacaccatgatcatgatgcaaatactccatattgttaagatgtcagttcctcctagcttgatctgtgatgcactacagccttaaacaaaattccatgaacttcttttggggctactgaaaaactgattctgaggtttatatatagaggcaaaaacctacatgtagaggcaaaagacctagaatagccaacacaatattgtaggagaataataaaattggatgattgagacactactcagcttcaagattaaatataaagctacagtaatcaagacagtgtgatattggtaaaagaatagacaaatcagttgatggaacgaatgcagagcccagaggtaagcccatattaatatactgaatgaatctttgacaaaagactaaaggcaatacaatgcagccaagagaatcctttcaacaaatgatgctaaaacaactggacatccacatacaaaagcatgaatcacaaacattacatcctcacaaaaactgacacaaatggaacacagacgtaaatttaaaatgcaaaactataaaattcctagaatgtaattaggagaaaatctagatgaccctggatttagcaattataatttagataaaataccaccagttcattttctgaaagtaaaatatcgatgtcaaatttaccaaaattaagcatttttgctctgtgaaagacactgtatagagaatgaaaagaaagacacagtatggaagaaaatatttgcaaaagatatatctgataaggattgttatccaaaatatagaaataattttcaaacaacaataaaacaaacgacctgactaaaaaatcaaaataaagagtgagccgaagacctcaatcaacaccacacctgagggcagcaggaatgaaataaccacaggtaaaccactgcttgctagtgttgcccacctttctttcagagaacagacagtgaacaaaggatgatggggccacagaagaagtaaactctatgtcttcagatctgttcacagtctggacctttaatatttacataggaagaaaataaaggcaaacttattttgctatttggccttgaccttaaaggccaggctgtggttatctgttttctcctgtggtgtgggaaactgagtgaatataagcaccaatcacatgcgtacatgtccacatgtccacatgtatttctgcatttattttatttatttatttatttatttatttatttatttatttacttacttactttttgagacggagttttgctcttgttggtcaggctggagtgcaatggcatgatctcagctcacagcaacctccgcctcccgggatcaagagattctcctaccttagcctcctgaggagtagctgggattacagatatgtgaaaccaggcccggataattttttgtatttttagtagagataaggtttctccatgttggtcaggctggtctcaaactccggatctcaggtgatccaccccaccttggcctcccaaagtgctgggattacaggcaggagcgaccacactcagcaatacttctgcatttctcaacattatcttacaagacatctaactttaaatagggaaaaatatcagtacttttacggtgctcagcgttagaaggtaactggtaatcaacctgtcattaaatcttggcattctatctgcactgggtgcatgtatcagttagctatgcagcataacaaaccatccaaaactgattagctcataattgaactgctcagccatttacgctggactcagtggggccattcttctgttctcagctgagctccttcagacatgtgtcacgagctgctcattgactaggaaggcagctgtgcttctaggggtgagcttctgcttctggggctgtcaacaggggcaccttgcttctcctccccatggtatcttatcctccagctggctaatataagcttgtttcatgaagatggcagcattctgaaagaaaaacggaagcagccccagcatggtggctcacacctgtaatcccagaactttagtaggccaaggcagatggatcaccttaggtcaggaatttgagaccagcctggccaacatggtgaaactctgtctctactaaaaatacaaaaattagctgggtgtggtgacacatgcctgtagtctcagctactcgggaggctgagtcaggagaattgcttgaacctgggagatggaggttgcagtgagccaagatcacgccactacactccagccttggtgacagagaaagactccttctcaaaaaaagagaaaaaagagagagagaaaagaaaagaaaaacagaagtagtcaaaacggtttgaatcttggccccaaactaacacattgtcatgttcccaggtttctactgccctgagcaagtaagaactgccagagcaagcgttaggaaaatagattctggatcttgatgggaatggctgtaaaagcacctgacaatggacgtgaatacaggagggatgaaaaattgctaccatatttgcagtcagtatccttctgctgttgtttgtttgtttgttttgagagggagtcttgctgtgttgccaggctggagtgcagtggggctattttggctcactgcaacctctgcctcccaggttcaagctattcttgtgcctcagcttcttgagtagctgggattacaggcccacaccaccacacccagcgaatttttgtattattagtagagatggggtttcaccatgttggccagggtggtctctatctcctgagctcgtgatccacccgcctcagcttcccaaagttctggggttacaggcgtgagccactgcacccagcccattctgctttttctgcatgtgtggcccacagaactcttccacatcaagaaattttccaaacacccacagctactaaatggctgggctgggactcaggatcaactctgtctgactccaaagcctatgtacctccatggatcacagtattcaagtagctgtcctagactcttaaaatcctggagagtgacacttcaaaaatagaaaccagattgcttttagatttgtgcccacatagtactgtttattgttgggaataatctcaagaaattactgaagcacatggtggctcacatctgtaatcctaacactttgcgaggctgagatgggagaatcactgaagctcaggagttcaagtgcagcctgggcaacatagtaaaatcctgtctcaatataaaacaaatttaaaaagttaaccaggcatgatgatgctcgggtgtctagggtaggaggattgtttaagcctggaaggtggaggttgcattgagccatgattgattacaccactgcactccagcctgggtgacagagtgagactctgtctcaagcaaaacaaaacaaaaacaaaaaaggaattgcaaaagcattttgaaagaacatagaataacttggaaaaaatagctgacatagctgatattgaataacttggaaaacataacttattttagataatcaaagcccaacaacacatcacttatttttttatcatacaaaacatttgaaaacttttaaaagaaaaaaacttcagagaaattaagtttaacatagtttaattgagcaaagaataatttggaaattaagcagcctgtggtcccaaatagcctcagagagactccagcacagccacatggaaaaaaagatttatgtacagaagaagcaaagtgacattcagaaaatagaagtgaggtacagaaacagccggatttattacagcttgggatttgccttatttgaatatggtttgaccagttgatgttcttttattagcaaaaaggtagtggttggtacaagaataagttacaatctatttacatattcagctatgttttagtttactatgtacagaaaatcctattaaccaaaattaaacaaaaggggtcagctttaggctttaattaatttaacaatatctcccttttggttatctcctcattttcaagaaataaaccaaaactttagacattgatattactttgtcaccattacaaatgtacttatttagtctcaaattctgctataaaatagcagaactgtgggttttgtaaagtgaaaacaagtacttcaggttattactttttaaaaggattacagtagggaagacctccttgtttgaaatctgctgtttaccaaagaaaaacaagacctggccagttttagcatctacctagttctttaaattttcagtttgactatgtcacatttagcatgaatgactccattttggtttggtttggtctgtttgggcctagtgaacaagctcagtccagaatgatggcctccaataattttgtttaaaaaatttcccccttttgattaagttttcacataggtcagagtgtgaccaaaactcagggtcttagtgtcactctcagtttccattatttttggtttccgttcttatcaggtcattcatgggttatggtgttctcatggtcaaatacattttctagttttcatcattccagttaaagagagaccacttgacattctagagatgactgcatgcaaagatttataacttttgagagaatagagtgcagtagggagactattattttgactatcaggaaaataatatcaagagttagaagtatgctttttttttttgagacgaagtctgtcttgtcaccgaggctggagtgcaatggcacaatcttggctcactgcaacctctgcctcctgggttcaggtgattctcctgcctcagccaccgaagtagctgggattataggcatgtgtcaccacacctggctaatttttgtatttttagtagagatgaggtttcaccatgttggccaggctggtctcaaatttctgacctcaagtgatccacctgcctcggcttcccaaagtgctggcattacaggtgtgagacaccatgccaggcctgaagtatgctttttaaccaaggaccccatgaaccaaccaatagatcaaataattagctagttaaatggtctactcatttcaaccagtctgttcattaatttcctacaactgaatctctgtaatactcgatgtatttctccatgtgcaactacaaatactagcaactgcacagatacttctctgtttatccagtaagtaaactagataaattcttttatttaacacaactttagtaaaaaaaaaaaaagtcttccaatgactttttataaaggtcaacacattttttccactctaagtgcatctatcatcagttgcaattacaaaagtaatctagtgaatttagttagctttgctcagtactattgtatccgtaatgccttatttaacagttttacaatttttctagtgaaataagtatctttgtaattggagaccttttcaaaaagctttcatgaagaaaaaaaagtcttagtatccttttagctaccgttataacatcaaccttcttgcatcagaaagcttttatactaccagaaaacatgcattaaaaatgacaattgccaggtgtgcaattttctgtccagtgctcacgtctgtaatcccagtactttgggaggctgaggcatgaggatcacctgagggcaggagttcgagaccagactgactaacatggtaaaaccaagtctctactaaaaacacaaaatttacctgggcatagtggcagccgactgtaatcctagctacatgggaggctgcagcaggagttgcttgaacctggaaggcagacgttgcagtgagccaagatcgcgccattgcactccagcctgggcaacaagagtgaaactcagtctcagaaaaaaaaaaaaaaaaagcacacctgtaatcccagtactttgggaggccgaggcagatggatcacaaggtcaggagttcgagaccagcctggccaatatggtgaaaccccgtctctactgaaaatacaaaaattagctgggcatgatggcacgtgctgtagtcccagctactcgggaggctgagttagaagaaacgcttgaacctgggaggccaaggttgcagtaagccgagatcttgccactgcactccagcctgggccacagagtgagactctgtctcaaaaaaaaaaaaaaaaaaagacaatttgtgtgtaaatgtttaaatgatggccctgaggtagcagaaacttacataaacttttaattatcttctgataattataagttcgacaaaaaaaaaatcagtcttaaactagtatagtaatttagaagtcactacacacacacacacacacatgcacatacacattcaatttatatttattatagattaatacagattacttatcttttctgtgatgagtagtgaaatgcagagtttttaataatggaaacttcaagaactcaggaataggaaccatatgcggtggcccacgcctgtaatcccagcactttgggagactgaagaaggtggatcatgaggtcaggagttcgagaccagcttggccaacatggtgaaacccatttctactaaaattacaaaaattagtctggcatggtcgtggccacctgtcatcccagctacttgggaggctgatgcaggggaatggcttgaacctgggaggtgaaggttggagtgagccgagatcatgccattgcactccagcctgggtgacaagagtgaaactccgtctcaaaaaaaaaaaaaaattactttaattaaaaaaaaaataactcaggaaatatcaagtggctgcctatattctccatgagtccacactgaacattaagtttatgtcttcttaaacactaggttactttccccaatttaggtgcacagcactgatacctgagaggttatcataggtcatttgacttggaccacagagttgatttaaaaagcatatctaaaacatttccgtactggctgatgtaactgaaaatgtggcagagtacttttgtaatagtcaattaatttttgtcttgtctgggctcgcaggtttttttgtttgtttgtgtttgtttttgttttttgttttgttttgttttgttttctttttgagatggagtttctgtcttgttgcctgggctggaaatgttgtgatctcggctcactgcaacctccacctcacgggttcaagcgagattgcgccactgcactccagcctgggtgacacagcaagactccatctcaaaaaataaaaacaaaaatttaaaaataaaagaaattaaaagctaattttcacaaaactttataaataaatccaacaaatatatcattttgaccactctagatttccatacatagtttataatctcttttaattactttttttgatagggagtttcactcttgttgcccaggctggagtgcaatggcgcaatctcggctcactgcaacctctgcctcccgggttcaagatattctcctgcctcagcctccggagtagctgggattacaggaatgtgccactatgtcccgctaattttgtatttttagtagagatgggttttctccatgttagtcaggctggtctcaaaatcccgacctcaggtgatccacccgcctcggcctcccaaaatgctgggattataggcgtgagccaccgcgcccggccttcttttaattactttttaaattttctctactttatttttttctacgttctttttattttctcaatttgagacaacctttaagtaatatcaaactagacaaaatatttttaactttcttcattgaaagcatatttttgcttttgcttgcacaatctctatgcaaaattgtttttcttagatccagtagttttaattatatatattaattacatgaactctttaaaacctaatttttagtgaaatctctagtaagtaatcttgaactgtttgatatcagtatttgtagacaaccattttatatttttaatagaagatgttttttcaaattctctgttaactagcagatctaaatatgtttagcttttctctatcatataaaaataagattcttgttgggggtagtggctgacgcttgtaatcccagcattttgaaaggccaagacacaaagactgcttaagcccaggaattggaggcaagcctgggcaacatggcaaaaccccatgtctacaaaaaatacaaaattagctcagcatcgttacctgcacctgtagtaccagctacccaggaggctgaggtaggagaattgcctgagcccaggagatcgagagtgcaatgagccgtgatgaagtcacttcactccatcctggatgacagagaccgttttttaaaaaattaaatgccaaagcatataaacttaatcttatgggacttcgggggtgggggtttgtttttattattctctcaacagctttgtggctacaggtggtgtctgactgcatgaaaaagttttttacgggtgattgcagagattttagggcacccatatcccaagcagtgtacacagtacccagtgtgtagtcttttttttaatttttgttttttgagacagagtctcgctctgtctcccaggctggagtgcagtgggcggtctcggctcactgcaagctccgcctcccgggttcacgccattctcctgcctcagcctcctgaatagctgggactacaggtgcccgccaccacgcctggctaatttttttttttttgtatttttagtagaggtggggtttcaccttgttagcaaggatggtctcgatctcctgacctcatgatctgcccgcctcggcctcccaaagtgctgggattacaggcgtgagccacagggcctggcaccaatgtgtagtcttttatcccttttccccgtaccgttgtttcccaagtctctagagtccattatataattttttttttttttttgagactcagttttgctcctgctgcctaggctggagtgcaatggtgcgatcttgcctcactgcaacctccacttcccgggttcaagcgattatcttgcctcagcctcccaagcagctgggattacaggcatgtgccaccatgcctggctaactttgtatttttagtagagacggggtttctccatgttggtcaggctagtcttgaactccccacctcggtgatccacatgcctcggcctcccaaagtggtgggattataggcgtgagccaccccaccccacccattatataattcttaagcctttacatcttcatagcttagcatacatcctcatagcaattttgcaatggcaaattctgctgctataaacatgcatgtgcaagtgtctttttcatacaatgacttatttttctctgtgtagatacccagtagggggattgctggatcaaatggaagttctatctttaattcatttagaaatctccagactgtttttgatagtagttgtactagtttatgttcccaccatcagtgtaaaagtgatcccgttgtactacatcaataccaacgtctgttattttttgattttttcattatggccgttcttgcaggagtaagatgataccacattgtggtttgtttttcagttctctgatcattagtgatgttgagtatttttttaaaacgttttttaaccatttgtatgtcttcttttgagaactgtttactcatgtgctaagcccacttctttataggatagtttgtttttttcttgctggtttgtttgagtttcttgtagaaactttgtcagtcctttgtcagatacatagtttgcgaatattttctcccactttgtgtgttgtttgtttactcttctgattattactatttttttctgagcagaagctttttagtttaattaagtcacatttattgatctttgtttttgttgcatttggttttggggttttcgtcatgaaatctctgcctaagcaaatgtctagaagagtttttgctatattatcttgtatagtttcaagttttccatttaagtctttgatccactttgggttgatttttgtataaagagagcaatgaagatccagttttattcttctagatgtggctcgctaattatctcagcagcatttgttgaatagggtgtcttttccctacttcatgtttttgtttagtttgtagcagatcagttggctgaaagtatttggctttatttctttattcactattctgttccattggtctatttgcctatttttataccagtaccatgctgctttggtaactatagtcttctagtatagtttgaaatcagataatgtgatgtctccagatttgttctttttgcttagtcttgttttggctatgcaggatcttttatttttctgtatgaattttaggattgttttttctaattctgtgaggaatgatggtggtattttgatgagaacggcataaatttgtagattgcttctggcactatgatcattttcacaatattgactctactcatccatgagcatgggatgtgtttccatttgtttgtatcatctttgatttctttcagcattgttttgtagtactccttgtagaggtctttcacctctttggttaagtatattcctaagtatattttttctgcagctggtataaagggtttgagttcttgacttgattctcagctcagtcacttggtgtatagcagtgatattgatttgtgtacattgattttgtatcctgaaactttactaaatttatttctcaaatctaggagctttttgaataagtctttagggtattctaggtatacagttatatcatcaacaagcagtgacagtttgacttcctctttaccaatttgtatgccctttattcctttttttgtttttttttttcgatggagtcttgctctgtcaccagtctggagtgcagtggctcaatctgggctcactgcaacctccaccttccgggttcaagcgattctcctgcctcagcctcccgagtagctaagactacaggcatgcaccaccatgcccagctgatttttgttttcagtagagacaaaatttcatcatgttggccaggatggtctcgatcttttgacctcaccatccacctgccttggcctcccaaagcactgggattactggcatgagccactgctcacttatactttgacttgctacatctttattctgtatgaatattaacagaattatagatagatctggatatagatatatgtaagtacataaacacacacatacaggattatattagtttgtatatgtaaatatttatgcatacaaaagatgttcatcaatagacatttctaattttccaccctaacctaaggacatagatgaagacttacttttcacctatatggctttataccatctcagactggaacacagccataaagtgttatatataaacatgaacaaacttcatgtttatgatcatggcctgtgaataaatattttggtagtgggatgtaaggctttatgtccagcttagcattttaggtccttacttttcttctcagagtatgcctgtattattcacatccattattttgagcctgccttgatgtctacacttttccagtttagctaatcagttgattatatttacctgagctgacctaattggatttttgcaatcacacaggctgagctaatttgcttatttaatttatctgggatgcaggggtagaaatgaagatgacctttgtcctaaatgggacatatgcaaaaataacctttacctatacatacatatgtgactcattctttgtgtacatgtttatctatcaacctatcttatatccatatttatatttacagaaaaaaaggcattgaagtaaacttggtaaaaggtaatttctattttctttacttccaggctacataaatccaatcagccgattagcacagtgaagatttataaaatccaagccaaaactttgccgcacttttttctttcataaatgtgaaaatgtccttcttacctggcccccaggtctttttatttctgaatctcaataaatcagcctagtgggcttctgttcaaccagttgaaaaagcaggaatgcctgacatcagtaagactatccttactcaggaagaagttttgaactggccaataaaagccaccattggcacttttgtgaatgttcactatgatctggttgaaatgcagcctgctaccatgtacaatcacatttactttcagtatgattgcctgtcttcgagaaagagtgctagactttcttcccattaccataaagacactacttcagtcacaaagacgaaaataccagttgtacttttacattacatactcataaaaataaactagatcacatgtcttaaagaaagccctgatgagaaaaaaaataaacattttacaatttagatgagaaccttaggactggggctggttgatctccggccatatgtccaacatgaagggatggattaaacttgacatggcagtgaatgacttccattggttagtgcatgttcattttccaaaagtgagcaataaagaccaatgcttccttcgtatatgttaaatgcagcaggatgtatgtcagtgcatacctctatagtgtacccttgtagatctagtttacagggcaaatatatttatacatgtatagaagttacttttcttggggggagggggatggagtctcgctctgttgcccacactggagtgcagtggtgcaatctcagttcaccacaacctctgcctcctgggttcaagcgattctcctgctgggactacagggatgcaccactatgcccagctaatttttgtatttttagtagagacggggtttcaccatattggtcaggctggtctcgaactcctgacctcgtgatccatccacctcagcctcccaaagtgctgggattacaggcatgagccactgcagctggccaggtaaacagatttttaaaacttacatacaggactatatgagtatgtctaggtaaatatttatgtatacaaaaaagttccccaatagaccatttttaatcacttggcatatacaaattatacagacatataattactttcaatctcttttgctcagtagcatttcagaatggagcatagccatacaatattgtttttataaacatgaacaaaacccttcaccttcagtagcacaggcctcagaaataagctgacagcaaagccatgttattcatgctgttcaggttggcacttcagggccctgcatttcttctcaatgtatgtatgtgcccttcacacccactagtttgggcctgctttgataaacctatagtcactatttagataattgtttgattggatctacctaggctaagaaaattggctgattggaatcaccttgcgctaatctaattggctaattagattcatctttactgataaaattggctaactggtatcacttgggctcatttaactggtgaattggaatcaccttgggctaatctaattagctaattggattcacctttactgatataattgactaattggtatcacttgggctcatttaattggctgattggaatcacctgggctgagctaactggcctactagaatcacatgggctgagttcattgactgcgtcttgaggagaatgagtaaggtaatgacctcttacatacttttcttttggggctttttttcaagacatactcacaaatagacattaattagacttatgtatataagccttagtttttatatgtgttttcctacatatatgtctcatatctgtttctaaatctacagaagaaagtttccggccaggcgcggtggctcacgcttgtaaccccagcactttggaaggccgaggtgggctgatgacccgaggtcaggggttccagaccagcgtggccaacgtcgtaataccccatctctactaaaagtacaaaaattagccgggcgtagtggcaggcgcctgtagtcccagctactcgggaggctgaggcaggagagtcgcttgaacttgggaggtggaggttgcaatgagccgagatcctcgtgccactgcactccagcctggcgacagggtgagactccgttttaaaaaataatcaaaaaaccaaaataacaatgcttactttatataagttaaatgccgatggatttaggtaatagtatacatccatttgggtagtattctaggtatatttcatagtgcagaaaattttatacatctatggaattatctttatatattaatattgatatcaataatgatcaacattttcaccttctacatcttcactttttatgaatatagatacaaagatggatacatctggacataggtagacagataaacatgcacgtacagaattatataagtacaattatgtaaatgtttatgaatatacaagatgttccacaaattatatttttaataccttagtatatactaagaatgcagatgtagacttactagtctactttatggcacagtaggaaccccaaatggaacatagccatatacaatgatgtttatagaaacataaacaatacttcactttcaaaggcaaggtctttgaaataagctgacaatacagcaatgtaatgctttatgaccagattagtatgtctgggcactgcttttcttctcagtgtagaaaagtgctttttacatccaccattctgacttaatgaatctacagtcactagattattggctgatttgatccacctgggcagaactaattgccttattggaatcaactaacatgagctaattggttaattagatacttctgaactgagctaattgactgattggaatcacaaggttcaactaactggctgattggattctctagaacctagctgatttcctgattaaaatcacatgagctgagctttctgtttagaatcgccgaggctgagttaattggcaaattagattcaccagggctgatctcattgactgattggaattgttaaggctgaactaattggctgtttgaaatcacctgggctgagctaatttactgattggaatcacctgggttgagtcgattggcaaaatgtaatcacctgggctgagcaaatttactgattggaattgcctaggctgagctaattgggtaaatggaatcacttgggctgagctatttggctaatggaatcacctgggctcagctaattggctatttgaaaacacctagcttgagctcattggcttattaaatttgcctgatgaaattgtattcatctatcttgaggagcatgagtagggacataacctctgatttacttttcatttgtgagtttttttgttttgttttgcttttttgacggagtctcactctgtcgcccaggttggagtgcaatggctccatccctgctcaccgcaacctccgcctcccagggtcaagtgattctcctgcctcagcctccccagtatctgggattacaggcacccaccaccacacccagcttcatctgggaaaaaaaaaaaaagattctatttctatgtcatgtatttgaaaacaaaagccctaaatttgagggaagctttaaaaagaattatttctcatttgcaaatttgtgttaaggccttcaagctgaggctagtttatccatgttttcacgttcaccagaattaaaaaggccatttttgacttggcaataaatgactctcatggccttagtacatttttgctaacagatgtgagcaacaaaaaccaattctttctttgaaagcattaaatgcagcaagatgcaggtcagagcatacctccacttgtgtgctcttacggataaaattcaaagggcaaataagattttgcatttattgaagtttttctttacattgctataagtacaaacacccatttatcctttgacctcttatacctttattctgtatgcatatggaaaaagtgatagttagatctgtatgtagatatacatgggtagacagataaacacacacatatagaattatatgagtttgcctatgtagatatttacgtatacaaaacatattaatcaatgaacattttaaattccccagcctacactgaggaggcagatataaacttactctcaactatatggatccatagcgtctcagactggaacacagccatacaatgttatgtttaaacatcaataaagcttcacgtttaggtgcatggcctgggaagtaagtttttggtaaagccatttaagactttagttccagcttagcattttcagggccctgcttcctttctcactgtatgctcatgtgatacatttgccatttgggtcctgcctggatgtcttcactttcccaagttagttaattgacttatattcatctaagcggctcattaaactcatctgggctgcagaagttgggaagaaaaacgacctctgacctacttattctgtggcttctctacaggacataagcaataatagaaattacattggtatacctatgttacccattttccatgtatatgtttatctagctgcctatcttatatatatatctatatgtataaaaaagactgccaaagaagagtaggttagaggtgatttttactttattgtccattcaggccgggtaaatccaatcagccattagctcagtgaagttttatcaaatccaatccaccaccaaatcacgttgtgctaaatgtgaaaatgtcctcattactgggcaccaaagtgttttaaattcagagtctaatcaaaatagcccatgtggttctgtccatccagctaggaatcttcagacatgccagtaggcctaattttttttcacaagctctggcctgaccaataagaacaacctttggtgcttcagtgcagtgtcattatcaaatgcagccaggtaacatgtaccattatatttgctttcagtatcataatcttctaataagaaacctaggctttccattatgataaagaccctactttagccataaagacaaaagggcaagagtgtactttcacattgcacactcgtggaaataaatgagaacccctgtcttgatgaaagtcttaatgagaagaaataaacattctcaaattttggtgagaaactttggactgagtctagttcaactttggccccatgtgtaacagaaacagaaggatcaacattgacatggcaatgaacgacttccattgccttagtgcaattttttttttttttttgagatggagtttccctcgtttggcccaggctggagtgtaatcgcatgatcttggctcaccacaacctccgcctcccgggttcaagcgattctcctgtctcagcctcctgagtagctgggattacaggcatgcaccaccatgcctggctaattttctatttttaacagagatggggtttcgccatggtgatcaggctggtctctaactcttgatttcaggtgatccacccgccttagcttcccaaagtgctgggattacagacgcaagccatcgcacctggccccttagtgcattatctcccagaagcaagaaacaacaaaaaatgcttttttcatatatgttaaatgtggcaggatgtatgttagaacatatttttatttgtgtaatatttgtgatattgtttatagggcagataaacttatacatgtatggaagttactttttttcgttttgtttttgtttttgtttcttgagatggagttgcactgtgtcacccaggctggagtgcagtggcgcaatctcagctcactgcaacctctgcctcccgggtacaagcgattctctcacctcagccctccaagtaactggggttccttcacccaccaccctgcctggctaatttttgtatttttagtagagacgaggtttcaccatgttggccaggctggtctcgaactcctgaccgcaggtgatctgccctcctccacctcccaaaatgctgggattataggcgtgaaccaccgcgcctggggggaagttactttttatcttactatattcatagtaatgcatatcaatacaaagattgatacatctagatataaatatacataagaagacaaacacatagagaattctataaatatttctatctaaatatttatgtatacaaaacacgttccccaaaagacatttttaatcttctaacatgcactaaagatgctgatgtagaatcattttttttctcttgctaaataatgtaaataacatgctaaatagaacataaccatacaatgttgtttatgtaaatatcaacaaagctttatcttcaagggcaaagccgcagaaataaactgagaataaagccatgtaactcatctgtccaggttagtattccagcaccctgcatgtctcctcagagtgtgtgtgttctgttcacatccaccatttggggcctgccttaataaagccacaatcactattcaaatatttgtatgattggtttgccctgggctgagctacttggctggttggaatcacctgggctatgcaaattggctgattggaatcacccaggctctgctaatttgcttatttaagttacctcagcttcaggggtagaatgtggagatgtcatctgacctactttatttctgaggcttttttttgagggacctatgcacaaattaacattacgtagacatacccatgtgactcaatttgtgtgtatatgtttatctagccacgtattttatatctctatgtacagaaagaagcctataaaataaacttgttcagaggtgatttccattttcttttcctacaggttaggtaaatccaatcagctacttagctcagtgaagatttattcaaaccaagccacatgccacatcacatttttttccataagggtaaaaatgtttttaataacctggcacctgggtgtttttaattctggtctcattaaacaagcgcagtgagttttttccatgtatctaggaactgccagaaatgcttgacacaagtgggctgagccttcctcacaaagatttgatctggaatataagagccacctgtgacacttcagtgaatgttcactatcacccatttgaaatgtagccaagtaccatgtaccattatatttgcttccatcatcaccatctgtctactaaaaagatctagacttcttttttattaccataaatacctgactcctgccacaaagacaaaaagataagactgtgattttacatcacacactcttggaaaaaaatagagttcttgtcttgatagaagttctaaagagcgggtgagagattaaatgactaccaggagctagataattgctgttttactaacaaatgttcattttcatttctatattatctcattatgttaataatgaagtaataacgtttatccagggaatttcaaaaaaacttattttttcatcagccataatagtaatcaaagacagagaaatggaggtgtttaactttcataatttatattttaaaattaaaatgcttctagaaataaaaaaggaaaggaagaaagaaatatacaaacaaatgaaagacagcctggtcaacatggtgaaagcctgcctctactaaaaatacaaaaattagtcaagtgtggtggtgcacacctgtaatctcagctacttgggaggctgaggcactagaatcacttgaacccaggaggtggatgttgcagtgcgccaagattgctgcactgcactccagcttgagtgacagaatgagactccttctcaaacaaaacaaaaaaataaacaaaagggaaggaagtggattactcacaatagctaaggtatggaatcaacctaaatgtgcatcagcaggtaaatggagaaagaaagtgtggtatatgtacacaatgcaattttattcagcccttaaaaataaggaagtcttgttatttgcaacaacattcatgaacctgaatgatatgctaagtaaaataagccagcacagaaaagagatggagtttccctcttgttgcccaggcaggcagtggtgcagaggcaccatcttggctcactgcaacctccgtctcctgggttcaagcgattttcctgcctcagcctccccagtacctgcgattacaggtgcccaccaccatgtctggttaatttttatatttttagtagagacagggttttgccatattggccaggctggtctcaaactcctgacctcaagtggtccacccacctcggccccccaaagtggtgggattacaggcatgagccactgtgcccagcccacataatccaacatctatgtaaagtgtgaaaaaaatttaaactcgccaggcacagtggctcacgcatgtaatttcagcactttgggaggccaaagtgggcaaatcacaaggtcaggcatttgagaccagcctgaccaacatggtgaaaccctgtctctactaaaaatacaaaaattagccaggtgtggtggtatgcacctgtaatcccagctactcaggaggctgaggcaagagaattgcttgaatctgggaggtggaggtagcagtaagccgagatcaggccactgcactccagcctggtcaacagagtgagactccatctcaaaaaaaaaaaaaaaaaaaaaatttaactcatagaagcagagaatacaataatgagaaaaaaaaaaaatccccctactgggttttggtctggttaagagagcttcttcatgatctttcagggattatatatgctttcattttctgcatccctctgttctccagtcaaagggtgaaaaaagatacagagaagacaatttgctttttacccacttcatttccactcactattagtcaatgtgggtatagctgagaatagcagttttctggcaggacagccacttctaagcaataaacaacacactgaaaataaagtataaatctttcataaaaagctaatgaattttaagaaaaacaagcatatgcatcagtaattcttggggtaaaataaagattcattttgttaatttctattgagttcccaaaatatttgatcaaaagctagcaaatatacaagagaaatggaatattattctaaataagaatattgtgaatggttattttgtcaatacaagtaaaaatatgatctcgcactaacagtctcacttagagttgtacaacatcaaatgctgtttttcatttaaaattgtatttcatataggtattcaatttatatcaccctcctttgctatttcaatcccttctccactttatatcagtggaaaacaggccagcaggtcccaggaaagcacatgttgctattgctgctttaacaatgatcatgaagagcacttgtttgggtgcgactcacgtgtcaaacactgttatttggcttaaagtgaggcagaagtttaaaaataataggtactgcatttgttcaccccaagaaaagtaaaagctaaggcccacaatgtggtaaggcaagagttaaaaagaaaagaacaagtttgcctctgcctagcagctcacttcaaggacagttagaagataatactgtctgaatagccaaggccaaaggaatgggctccagacatccacctccctttcagagcaaggttgaaggaaaaaacaaagagaaagataggttcttttactattactcttttcccaggcttcttaagcatgattatgttttacaaatgtctgtatttagccagttcttgtttttcttctaatgcagctacaaggccaccggctaggtcacaagttatattacgctatagattacgtgacctgtcactgtatgattaactgctattcttttgcttctggaatgctgcttctaaaaaccccactctgtctttgttcaatgctcagcttttggatgtgaatcctctgagccggtgcataactaaaataaacaagcccttcggtactccgtattggtttcttcattcctcaatttaccacaacatttttggtgaccacgaagggaccagagagggcaggcttactgtctcctttgcctctggggactggagcgtgagcctcgggaaacctgtggccccaggtgccactgggagaacttcagcccggaggggagatcagctgtcttttcacccagtgccccctacccagcagtgcaatagaacctaaagaggagctacaggacaatttcagaaacagcgtgcttcaggaagcacggtaaggttttgggggcccaaggcaggacctgtcccttggacagaaggggagcctgatcacctcctggggtatgccaaataatcggacccagaggggctcagggcaatgggagtggctcatcgattcggatgaaactcacaacctgctgacacaggacatgaaagtggttcactaagttgcctaggaaactggaggtggtgacagaggctcaccaccccaactgggaactagagggggcaagagtggctcgccacaccaactgtgaaactagagggggcgggagtggctcaccaccccagttatgaacatgggaactgaaaatgtgtgaaagtatgtgaatggaggggactaattaggctcatcagctgggaagtggggagtcacagatctctcagcgtggactgtgtgctccaagaaagtgtggggtcgactaagactagtggcaatctacatacagctaatagaaactgccctacagctcagagttgtagcgggaataaggacttctccaaagccaagcagcatctgaaaactcctgtagtaagagacagtgtagtcggctaaaatgagaggaagagtgagtgtgcaagagtgaatgtgctgcgtcgtaaagggaggagtgcgaggaaagtcatcaaaacatcaaaacttggcgtgcatgttacagaaccttaagaaaggttttgcaggggttatagagttaagattaagattatagagttaagattatagattatagagttaagttaaccccctcagaggttgagaactttctgtgaattagaatggccctcttttggtgttggatggcggagcaaacgaactatagacggaaaaattggccatgtatttagggtggtgacagggggtggaggactgccagtgtacccagatgaaattcctttatattgactcgtggttaaatataatatagacaaaaccagcatagatccagccctgtttaatggcttattgcaaaaaaagccaaaagtgaaagtaagagcagcttcactggcagatacagagttaaacggggagtcccagagaaagcaagagaagccagttttgcaggagctgccagaggaaacagaagttcttcctccatatgtcccagcctacccccctttaccgaggccaacagcccccccaggaacaagattcaggagctaacacgccccaggtctttcctcgaaggggaggatcaggcccttgagaggctagggaaggaagtcaagacagtcaagtgggccatttcagatctggccatgctcaagctgtgcaaatgcctctcagggagaagataggacctatctattatgatgaccagggccacatccagaggggggcaatggacttatatctatcagcccttttcaattactgatctactaaactgaaaacaccatacactgtccaacatggagaagcctcaagttcttatagatctgatgcaattcctctttctgacacacaatacgacctggccagattgcaggcagcttttcctaatgttgtttaacattaaagagtgccagaggatgacacaggtggctctccgctggctagaagcccatgcaccaacagacatagtgaatgctcaggcatacgctcagggtcagttcccagaccaagaccccaactgggacccggaggatgcaactcagcttcagcgtttgcagaggcaccgagaggcacttctgcagggcctaagagctggtggaaggaaagcaattaatataaggaagatttcagaaatgcttcagggagctgacaagagcccaagttagttttataagagactctgtgaagtattctgcctttatacctcatttaacactgaggttgctgaaaatcagcctgtggtgaatacagcatttgtaagccaagcccagggtgacatcaaggggaagctgcaggcatgaataccacccagtctataaaagtggccaaggtgtatgttaactgtgaccagggaacaatatgcaaaagcaacaagtgtggcagctaggcattccaagggttaactccctctccccagcccggctctatttggaacgagacgagggtggagactggcactgggagaagagcgaaggagaaggtaaggagaaagagtgtgagaagggaaagaagaaagtaaaacggaaatcagaaagaaacaggagagacagacagcaagcgtgtcagtagggtccgtactcttgcccagacccaccgctggctgcagaagcaggagaactcaggaaggaaaaaggaaagtaaattgaaagtttaagaaaaaggccagtctgttggcaacagctcttatggaaagagagattagcaatgtgagaggacttggacgtggacgcagacatggaagaagtcaagttaggcagaaattcaagagccggacaaggctggaaagagattaatgtatgagaagcaaaaagaaaggaccctggaaagatgaatgttcagaaggcaatgacggaaatggctaaggcagcgagacaaagaggccatcggtcaagggctgccgcacctttgaggaaccaaatactgatctgattgggctgccaggagctgaaggatgtaaagactaagacagatcgggcaccttctcactaggcttccaggagcccatggtcacattagaagttaaaggcattatcctcaggtttggactgtctctaactttaaagtcagacaatggactggcatttctagctgaaatagtgcaagatttaacaagactgttaaaaataaaatggaagttacatacagcctattagctgcaaatttcaggaaaaggtggaatgcatgaaccagacactcaaatagctactgaagaaatattgccaggaaattcatttgagatagaatcaggtgtttgcatatgatcctcctccaagtcaggtgcacccccaccaaacaaattgggtatttgcccagtaagattttgttcagtcaggcacccccaaatcaaaagtcaaattaaaggtgccctccagtaagtaggggaattaaccttaagaaagagatgcaggctttaggaatagccatacaaagtgtttagaattaggtacatgaaaatgcctataagcctgacacccctttaaatctggtgactgtttaggttaaaaagtagaatctaatttctctaggactcaaataggatgagccctctactgtaatcttgtccactcccactgctgttaaagtttcaggtgctgtgtcttggatccaccacagtcggctaaaaccggcagctcaggacaagtgaaccagccagcaggacccagatcatccaacctggctgatcctgaggcgagaccaagctgctgctgaggacaacagccctgctctggtcactccagaggctgaccagtctatgcatggctgaagcttgaggaaacaacaagccctgctctagtcacacaccagaagctgactagtctatgcacggccaaagcttgaggactcatcaagcaagtaaatgcagttagaaatcttaggactagtagttttactgtatactaactgtttgactgttgttctgtccctgtgctcaacctttttcccaggtgaggacctcttttgcccttgctggatatgaatatgctgtacattgttttgttgttgttactcctcttaaccattctagaataaacacctatagaagggtgtctccactgtacacatactacttgattagggaacagtataactagaaccctattgtactatacttatgagtgtacagggactcgattaggaacttgtacttataatcagaccacctattcaatttgtgacccaagaaatggtcagccttatatatgctgtgaccctgagtctttacctgggactcggttggagattcatactgagtcaaaggaaagaagttttataggtcaaacccaagcctctcttcctggagctatatgcatatactttgatatttgtcagttaacatctatgaacccaaactatctcacaatctctggtcctacagagtactatacaaactgccagtacaaaattgtgtgtgcaccctctgtttgtccttccaaggccctagcaatagcttgctggaactgtacaatgcagttcactgactgatcatcaccgaggtcaaagccaatcttgctcatcaaagtaccagcaaaactggattgtaagacaagcacttgcaatcctgtaagtcttactatcttaaagccagatctacctatatggactacaggttactccattgcattacaaagctatggtcaaaaaactaaaataactttgtatattctaaagaggactcaaaccaagcagtcagcccagcagcaattctgagtctttaagtcattctttgagcatataaaccagaagttaccagagcctcctcctttaggcaaaaacctatttgctcagctggctgaaaacactgccagcagcctaggcgtttcctcatgttatgtttgtgaagggactaacatgggagaccaatggccttgggaagtaaaagagttaatgcctcaagataactttactctgactgactcttttcccaaacagatgcccacaggttcaagcgtctggctcttaaaaacttctattattgggagatactgtgttgcttgctggggaaaggattttacagacccagtagaagaacaaacctgcttaggacagcaatattataatgaaccattaaggaaaactttgtggtgggacagagatgactacaaagcacatcatccaaattcgttctcccatttctcttctctaaattacacttggtatcaacttgcagctccaaatacttggcaagcacccccggtctttactggatctgtgggcctcaagcatattgacagttgccagctaaatggacagggggctgtgtgcttggaacaattagaccatctttcttcctgctcccactgcaacaggggaaaactttagggtatcctgtctatgatgaagttagaagaagaaacaaaagagatgcagccataaaaaatatataaaaaataggagattgggaagacatagggaagtcccctgaaagaataattcaacactatgggccagctacctgggcacaagatgggtcacggggatactgcactcctatttacatgcttaaccacatcataaggttgcaggcagtacttgaaatcatcatgaatgaaagagcaaatgcattagatttactggcccagcaaaccacaaaaatgagaaatgctaactatcagaacagattagctttagattacctcctagcccaggaaggaggagtatgaggaaagttcaatctaactaattgttgcctggaaattgatgacaatggaaaagcaattatggaaataactgcaagaatgagaaaattagcccatattccagttcaaacttggaaagggtggtccccagattctctctttggaggctggttttcatttttcacagggttcaagattttaataagggtggttctggccatactaggaactgcctaatactcccttgtgtcttacatctgcttgttagaagcattcaatcaactatagaggaaatagtagctaggcaaactaccacacagctcatgactctgtgtaaatatcaagctttgtctaaagaagaaaacttgtctcttcaggcagaactaagtaatagtgatgacttctattaaacttctttcataaaaggcatcagaaaggggaaactgaggcaagcatttaaaaataataagtattacaattattcactccaagaaaagtaaaagctaaggcccagaatgtggcaagacaaggattaaaaagaaaagaacacgttttcctctgcctagcagctcacttcaagaacagttagaagataacgctgtctgtacagccaaggccaaaggaatggactccaggcacccccctcccttccagagcaaggttgaaggaaggaaaaaaaaaaaaagagaaagacaagttattttactgttactcttttcccaggcttcttaagcaggattatgttttacaaatgtctgtatttcgccagttcttgttttccttctaatgcagctacaaggccactggctaggtcacaagtaatgttatactatagattacatgacctgtcattgtatgattaactgcttttgttttgcttctgaaaggccgcttataaaaaccccactctgtgttcaatgctcagcttttggatgtgaatcctctgagccggtgcacaactaaaataaaaaatcctcctgtactccgtattggtctcttaattcctcagtttactgcaataaaagtactgtttttctacttttttctaaatttacctgtaatataaaattgttagccaagaagactttatcttattcaaatatgttttatgggatttcattaagtgtctgaattatctggagtacttacattttccattaagctaaattgagtactacagataatctttaactaaaagcttttctgaggcagaataagatttgtaacattttattatcatatgaaagaagtgtattaaccatgttttcagtaatcactctgaacacagcattctcagttcccagtatgcaccctgagtcactcaggggaaactggtttctctgtaaagaggcagaagaaaatgctgagtggaggcaccacactgcacagcaatgctttccacatgcacctattagggtcttcatttaattgggctgatatttgcatagctacttactgaatttagtcatactatttttgagcagctaatggtgtctgttacctattaattttatacatttgctttttttgaaaaacaaatcttttgttaatttactctaagttgagactacatttaaaatgttcaatttttcagcgttaaagcaaatcagagaagagcaatgtgtatatagtgtgcattttcctatcaaaattctttattgcattggaaaccccaggaagccaactataaaatactccctttgaatactttagccaggattttagacttcaaaaggtcaaaaacaatgagcaaagtcaaaatcttgtttttatttcttgttagtcatctggccatttccaaaagcatgataattaagccaagtcattgaaaatatgcagttttgattaattttatcccatttggaatgttttctttaattgttttatcatgttaatctaaaagaaactgtctacataattatgctttcaagaattattcatattgtttacagtttaatcatttactacagtatagtaaaatcatttacaatagaattatgaattcattgtttttaaggtttttcaaatatgaaaacagttaggtatgatttgatgtaagttcaactctaggacattacccactggtcttcatggtatttctgtaatgaatagtataaaactaggtcgccagaatggtgcagacatgctgattgaattagaatgagttcagccttgttggtagactattggtatcccagaggctgatcattcactacagcttactaaatgtagttccataatgccagtgagcacttttacccaggttacctttttcctttcattaatgtggacctgttgtggtctcctgtttttcttaagctatcccaggtgagaggtgattatttcttgcatgaatgagattccctttttttcccctctgccataggatcctcttattctccctactggaagcaacatgcagaaggcaggaatgatgacaataaacaaatacgtttcctgccatgtggccaccataagcagcttacaacatggctcacctagaagtcacttactttcaggccagcaggggtgttttctatgatgtgtctctttctcttaaaagcacttctgattaagtttagcacaatcaggataatctccattttggtaaacacgaagtcaacagatgagtaacgtaatttcatgagtgatgtcccaccacagtcacacacttttttacactcgagagtattacacagcaggtgcgcaacagactgggaatccagggtattatcttaaaatgttgcctacccacctgaataaacttttaaaatagtctttctactgcttttgttatctacataaacaaaaatgtcatctgcaaataataactactttccagttttattcattacaaatattaactaacatctttttttctggcttaaattattattcctttatgtgtcattttatacattcacacacacatagaacaataaaaatgtatccaattattcaattttggttaaatttttattaaaataagcgttaaaaataattttttgagtgtgtttgaagagggcttttattgttgtactcaagagtgttatttctggagacaaagttgcctgtgctttaatacacggattctggggagaatccgagccataagccataaaattttatattaataaattccatacaaagcagaaagtatacatttgctttcagcatattcaaggtgtttagttttccattaatcacctaaaaacttattttgttccaataattgcgttttcttctgaaaatatgtacaaatgcatatttaccaaacactcatttcataattttcttacacctaaggtttatcttcagaggaatatgtgtatatttcactctatgaaaattaaaagtctttacgtttgcaggcagagtgaccacatgttcaaagaaactatataacaaatatttattaataatttttcaggactcagaaatgtaattttttttcctttgaggagtctcatcactctgtcacccaggctggagtgcagcagcacaatcttggctcactgcaatctccacctcccaagttcaagtgattctcctacctcagcctccaggtgtgcgccaccatgactggctaatttttctatttttagtagagacagggtttcaccacattggcgaggctggtcttgaactcctgagctcaagcaacacacctgcctcagcctccgaaattgctgggataataggcatgaggcactgcacatggccgtattttttctttttttttttgtgacggagtcttgctctgttgcccaggctggagtgcagtggcacgatctcggctcactgcaacctctgcctcctgggttacaccattctcccgcctcagcctctggagtagctgggactacaggcgcccaccaccacgcccagctaatttatttttagtagagacagggtttcaacgtgttagccaggatggtcttgatctcctgacctcatgatccacctgcctgggcctcccaaagtgctgggattacaggtgtaagccactgtcctggcttttttctttctttttgagatggagtgtccgtctgtcacccaggctggagtgcagtggtgctatctcagctcactgaaacctccacctcccaggttcaagccattctcctgcctcagcttcccgagtagctaggaatacgggtgcaccaccatgcccaactaatttttgttgttttagtagagagtttcacaatgttggtcaggctggtcttgaactcctgacctcatgatctgcccgacgtcgcctaccaaagtgctgggattacaggcatgagccactgcgtccagcccatattctatttatatttctgtataatttttattatgaccataaaaatcaccctgtagtcaattacaatttaattggacatttaaaagtaactaaaagtgtataattacactgtttggattagaaaggataaatgctagaggtgacagataccttatttaccctaatgtaattactacatattgtatgcctgaatcaaaatattctctataagacatatatacacatactatatactcacagatagtaataataaattaagaaaaaagattaaaaatttaactaacgggaacaatattcttcatttgcagtttactggcaaagtgattactagtgatgacattccactacataccaaatagtatacttcttccatcttttgcttacaccatttgagtaaggccggataggttaaagttagtggcataataatgcttcattaaatgcacaatagttttaagatggtaaaaaataaaataaaattaggctggacatattggctcacacctataatcccaacactttgagagcctgaggtgggtggatcgcttgagctcaggagtttgagactagcctgaccaatatggggaaaccccatgtctattaaaaatataaaaattagccaggcgtggtgtcacgcacctgtagtccccactactcgggaggctgaggcaggagaatttcttgaacttgggaggtggaggttgcagtcattgtgctgagactgcactgctgccctccagcctgggtgacagagcaagactccatctcaaaagaaaagttaagtaagtaaataaaatataagttaagttcacacatcatctaacaatttttaaatatattgcattttattacgtaacagtaaaattagtaaaataattgatatactttaatttataatttctttctctcagtataatgtagaaaagtattactctgaacacctaccttaaacattacttaatataggttaactacaatgagcctctccacttatattttcgtcatgcatcttacattttaatgtccttactgttttatagaaaaggtcataaagaatgcccaactcataaagaatctctaatatctctgatgcagcaacaattgatcacatactttcacgtgaatataataaagtaacagcataatttgaaagctgtattacatcattcacttttcaaaaaaattgttttcaaggaaacaaatatactttcaatgtaaatacaaagcttcaaaaaatctccttttaaagttatatactaatttatacaaacttatatacaaatttaacaactttagttgtgaattcatttatatactcaacactcttatttaatgtaatgtctgaagtgtcagtgccttagttattctgtaaattctgatatttacatacaattaattttgaattaaatattttttcatgtttactgcatctgcaaaaatatattttagtataaactctgctgttttctaagctgtagttttttttttttaaagtgtttccaaattcattacatttgcaggacccttctccaatataagttctctgatgttgagcaaagcttgagcaactgcttcaggattttcctctagtacaaaatgtgtgtaataaacctcctgtatatttgtaatggttgtcttcagaataaatactcttcttcactttaaaggcttatattttctgaaagattttttgacagtaattgcacttttaatgctttcattaactatgaaccttcttatgttgagtaagatgtgagtaggcattaatgggttttccatattctttatatttgtacaatttttctcaaggataatagctttcctgcaaaataagatgtacacattgattaaaggttttgccacattcttcatgcttgtaggaattttgccagtatgaattatcttactatcaaatgtggcaaccatataaaggctgtttcacattttatatatttctagggtttcacactagtataaattttttatgtatagaaaggatggaagtgttgaaaaaagcactgtcacatctttcaggtttgtagagttcctcttcagaatgaattatcaccatgtctcttaatagtaagaacttgtggccaggcatggtggctcatgcctgtaattgcaacactttaggaggctgaggtgggtggatcatgtgaggtcaggggttggataccagcctgacaaacatggtgtaaccttgtctctactaaaaatacaaaagttagctgggcatgggggtgggcacctgtaatcccccttacttgggaggttgaggcaggagaatggattgaacccagaaggcggaggttgcagtgagccgagactgtgctattgcacaccagactgggtgacaagagttgaaactccatctcaaaaaaaaaaaaaaaaagacagaacttgttatatgctttgccacattcttcacacttgtagggtttctttccagtatgaattatgtgtaataaaggttgagaagttccttaaaaaatctgtcacattctttatatttgtagagtttatatttcatatcaattcttagttagaaattgagggctggttaaaagattttccccattcatcacattcacatggtttctctccagtatgaattatcttatgtgcagtaaggtgtgaggataggtgaaaagctttaccacattattcacatctgtagggtttctctccagtatgaaatctcttatgtgtagtaagtttagaggagtgcttaaaggctttgccacattcttcacatctgtagggtttttttccagtatgaattttcttatgtgtagtaaggttagagaaatgcttaaaagctttgtcacattcttcacatttgtagaatttctctccagtatgaattatcttatgtgtagtaaggtgtgaggaccgcttgaaggctttgccacattcttcacatttgtagaatttctctccagtatgattctctcatgtgtagtaaggattgaggactggttgaaggctttgccacattcttcacatttgtagggtctctctccagtatgaattttcttatgtgtagtaaggttagaggagcacttaaaagctttgccacattcttcacatttgtagaatttctctccagtatgaattctcctatgtgtagtaaggattgaggactggttgaaggctttgccacattcttcacatttgtagggtctctctccagtatgaattttcttatgtgtagtaaggttagaggagtacttaaaagctttgccacattcttcacatttgtagggtttctctccagtatgaattatcttatgcgtagtaaggtctgaagaccgcttgaaggctttgccacattcttcacatttgtagggtttctctccagtatgaattctcttatgtgtagtaagggtagaggagtacttaaaggctttgccacattcttcacatttgtagggtttgtcttcagtatgaattcttttatgtgtagtaagggtataggagtacttaaaggctttgtcacattcttcacatttgtagggtttttctccagtatgaattatcttatgtgtagtaagggttgaggaccggttgaaggctttgccacattcttcacatttgtagggtttcttttccgtatgaattatctcatgtttactaagggttgaggatgacataaaggctttgccacatttatcacacttgtagggtttctctccagtatgatttctcttatgtgtagtaagagtggaggagtgcttaaaggctttgccacattcttcacatttgtagggtttctctccagtatgaattttcttatgtctagtaaggctacaagagtggttaaaggctttgccacattcttcacatttgtagggtttccctccagtatgaattttcttatgtgtagtaagagttgagaactgcttaaaagctttgccacattctatatatttgaaaggttttttcccagtatgtcctctcttttgtccgtttgaatttggaaattgatgaaggactttcacatatttatcacattgacatatttttcttggggtagttgtcaaacattggttaagttcattataaccttctttgtgcaccttacactcatccacacttatacatcctttttttaactgtaaattgtcatgttcacatttttcatatcttctcagtaccactttttggaaagaatctttcatgctctgctctggccaaaggtcttgggcaaaatgagaacacattactgaaagaaacaataaaaacacattacttcaattggtagactcagataaatataaatatatatatgcagtttgtatagttttatacaaactacataagcaagatgacacaggaaaataccacaagctgtaatttcttcctggacatatgaatttaacaaaaacatactgatcaaaatacatttgtaaaaaacttataataagttgtgaagggccccaggtgagcacaatgcaaacggccaaatagaagaaatagaaaagtctgttacttatacacaacacagctggttttgctctccagtataacattgtgcctttaaaagtaaattgttgactggctggggtgacacacgcctgtagtcccagcatgttgggaggctgacgtgggtggatcagaaggtcaggagttcaagaccatcttggcaaagatgatgaaattcaatctgtactaaaattacaaaaaattagctgggtgtggcgatggggcacctgtaatcccagctactcagaaggctgaggcagagaactgcttgaacctgggaggtggaggttacagtgagctgagattcccagaatctctagttaagacaattgatttcagactatgccaggacacagctacattataaagattgtaacaggtagcattttgttaatgtaaaaatctcaaagattacaataaatacaaaatagtagagcaacgtgatcccatcaaaaagttataaaatttttaaagcaaccataaaatgtatatgaggtaatttaaaaaattcccaataagttgtacaggtcaagcttagtggctcattcctggaatcccaacacactagggggccaaggtgggaaaaccacattaggtgagaatttgagaccagcctggccaacatggtgaaaccctgtatctactaaaaatacaaaaactagctgggcatggtggcatgtgcctgtaatcccagctacttgggaggctgacacacaacacaagaattgcttgaacctgggaggggacagttgcagtgagtgaatattgtaccactgcacttcagactggatgacagagcaagactgtctcaaaaataaaataggctgggcgcaatggctcatgcctgtaatcgcagcaacttaggaggccaccttggcctcctaatttgaggtcaggagtccaaaattagcctggccaacatggtaaaaacccatctctgctaaaaatacaaaaaattagctggaatgctggcagccacctgtaaccccagctacttgggagacagaggccggagaattgcttgaactcgggaggcagaggtagctatgagctgagatggcgccactgcactccagagcctgggtgacagaaaaagactccatctcagaaaaactaactaaataaataaatttgaataacattaggtaagtgaaacaaacaagtactgaagataaaaatgaggataataataagaaatattgaaatagcaaaaaaacaaaaattgtggatataaaaaatgcaaaaaacaattgaaaaatttcttaaaaggaaaaatgatgtaaacatgaaaaagctgaagaaacaaactaggatacacacaaagatatttgtaacaaacacacatacaagcaaaccttcaaaaatcatagataagaagagaattttaggagctgtaatgtaggcagatgtaatgatgaagaatttttgtattcaactgaagtttattttttaccacattcaaatatattgttggatcttttagaggttttatgtaatctcccaaagtaccactaagaaaatatttgtatggatacacaaaagaaaatttaaaaaatcctggaaaaataccaatacaaaaagcaaaaaaccacgaaaaccacagaaagaaaaggaaagacaaagatataagaatcaaataaaacaaataataaaataacattagtaagtttttctctttcagaaaaccatttaaatatatatataattatctttccaatcaagagatatactttcaataaacaggtttattaaaaaattttaaaaatcaagagtcaacttgcctttctacaggagtcagttgagatctactgacaaaaaaagactgaaagtggcaagacagaagtagaatttcatgtaaatatatttttaaattttattattattacactttaagttttagggtacatgtgcacaacgtgcaggtttgttacatatgtatacttgtgccatgttggtgtgttgcacccattaactcgtcatttagcattaggtgtatctcccaatgctatccctccccctgcccctgacgccacaacagtccccggtgtgtgatgtttcccttcctgtgtccatgtattctcattgttcaattcccacctattagtgagaacatgcggtgtttggttttttgtccttgcgatagtttgctgagaatgatggtttccagtttcatccatgtccctacaaaggacatgaactcatcattttttatggctgcatagtattccatggtgtgtatgtgccacattttcctaatccagtctatcgttgttggacatttaggttggttccaagtctttgctattgtgaatagtgctgcaataaacatacatgtccatgtgtctttatagcagcatgatttataatcctttgggtatatacccagtaatgggatggctggatcaaatggtatttctagttctagatccctgaggaatcaccacactgacttccacaatggttgaactagtttacagtcccaccaacagtgtaaaagtgttcctatttctccacatcctctccagcacctgttgtttcctgactttttaatgattgccattctaactggtgtgagatggtatctcattgtggttttgatttgcatttctctgatggccagtaattatcagcattttttcatctgtttttttggctgcataaatgtcttcttttgagaagtgtctgttcatatccttcgcccatcaaaaagatggggctgtttgtttttttcttgtaaacttgtctgagttcattgtagattctggatatttgccctttgtcagatgagcaggttgcaaaaattttctcccattctgtaggttgcctgttcactctgatggtggtttcttttgctgtgcagaacctctttagtttaattagatcccatttgtcaattttggctttcgttgccattgcttttggtgttttagacatgaagcccttgcccatgcctatgtcctgaatggtactgcctaggttttcttctagggtttttatggttttaggtctaacatttaagtctttaatccatcttgaattaatttttgtataaggtgtaaggaacggatccagtttcacctttctacatatggctagccagttttcccagcaccatttattaaatagggaatcctttccccattgcttgtttttgtcaggtttgtcaaaggtcagatagttgtaggtaagcggcattatttctgagggctctgttctgttccattggtctatatctctggtttggtaccagtaccatgctgttttggttactgtagccttgtagtatagtttgaagtcaggtagtgtgatgcctccagctttattcttttggcttaggattgacttggggatgcgggctctttttggtttcatatgaactttaaagtagttttttccaattctgtgaagaaagtcatcggtagcttgatggggatggcattgaatctataaattaccctgggctgtatggctattttcacgatattgattcttcctattcatgagcatggaatgttcttccatttgtttgtatcctcttttatttcactgagcagtggtttgtagtcctccttgaagaggtccttcacatcccttgtaaggtggattcctaggtattttattctctttgatgcaattgtgaatgggagtttactcatgatttggctctctgtctgttattggtatataagaatgcttgtgatttttgtacattgattttgtatcctgagactttgctgaagttgcttatcagcttaaggagattttgggctgagacaatggggttttctagatatacaatcatgtcatctgcaaacagggacaatttgacttcctcttttcctaattgaatacactttatttccttctcctgcctgattgccctggccagaacttccaacactatgttgaataggagtggtgagagagggcatccctgtcttgtgccagttttcaaaggacatgcttccagtttttgcccgttcagtatgatattggctgtgggtttgtcatagatagctcttattattttgagataagacccatcaatacctaatttattgagagtttttagtatgaagtgttgttgaattttgtgaaaggccttttctgtatctattgagataatcatgtggtttttgtctttggttctgtttatatgctggagtatgtttattgatttgcgtatgtcgaaccagccttgcatcccagggatgaagcccatttgatcatggtggataagcttttttatgtgctgctggattcggtttgccagtattttattgaggatttttgcatcgatgttcatcaaggatattggtcgaaaattctcttttttggttgggtctctgccaggctttggtatcaggatgatgctggcctcacaaaatgagttagggaggattccctctttttctattggttggaatagtttcagaaggaatggtaccagctcctctttgtacctctggtagaattcggctgtgaatccatctggtcctgaactttttttgattggtaagctattgattattgcctcaatttcagctcctattattggtctattcagagattcagcttcttcctggtttagtcttgggaggatgtatgtgtcgaggaatttatccatttcttctagattttctagtttatttgcatagaggtgtttatagtattctctgatggtagtttgtatttctgtgggatcggtggtgatatcccctttatcattttttattgtgtctatttgattcttctctcttttcttctttattagtcttgctagtggtctatcaattttgttgatcttttcgaaaaaccagcttctggattcattgatttttttgaagggttttttgtgtctctatttccttcagttctgctctgatcttagttatttcttgtcttctgctagcttttgaatgtttgctcttgcctctctagttaattgtggtgttagggtgtcaattttagatctttcctgctttctcttgtgggcatttagtgctataaatttccctctacacactgctttgaatgtgtcccagagattctggtatgttgtgtctttgttctcgttggtttcaaagaacatctttatttctgccttcatttcattatttacccagtagtcattcaggagcaggttgttcagtttccatgtagttgagtggttttgagtgagtttcttaatcctgagttctagtttgactgcactgtggtctgagagacagtttgttataatttctgttcttttacatttgctgaggagtgctttacttccaactatgtggtcaattttgaagtaggtgtggtgtggtgctgaaaataatgtatattctgttgatttggggtggagagttctataaatgtctattaggtcctcttggtgcagagctgagttcaattcctgggtatccttgttaactttctgtctcgttgatctgtctaactttctgtctaacgttgacagtgcagtgttaaagtctcccattattattgtgtgggagtctaagtctctttgtaggtcactaagaacttgctttatgaatctgggtgctcctgtattgggtgcatatatatttaggatagttagctcttcttgttgaattgatccctttaccattatgtaatggccttctttgtctcttttgatctttgttggtttaaagtctgttttatcagagactaggattgcaacccctgcctttttttttgttttccatttgcttggtagatcttcatccatccctttattttgagcctatgtgtgtccctgcacgtgagatgggtttcctgaatacagcacactgatgggtcttgactctttatccaatttgccagtctgtgtcttttaattggagcatttagcccatttacatttaaagttaatattgttatgtgtgaatttgatcctgtcattatgatgttagctggttattttgctcgttagttcatgcagtttcttcctagtctcaatggtctttacattttggcatgattttgcagcggctggtaccggttgctcctttccatgtttagtgcttccttcaggagctcctttagggcagacttggtggtgacaaaatctctcagcatttgcttgtctgtaaagtattttatttctccttcacttatgcagcttagtttggctggatatgaaattccgggttgaaaattcttttctttaaaaatgttgaatattgatcctcactctcttctggcttgtagagtttctgccaagagatcagctgttagtctgctgggcttccctttgtggataacccgagctttctctctggctgctcttaacattttttccttcatttcaactttggtgaatctgacaattatgtgtcttggaattcctcttctcgaggagtatctttgtggcgttctctgtatttcctgatttgaatgttggtctgccttgctagattggggaagttctcctggataatatcctgcagaatgctttccaacttggttccattctccccgtcacttttagatacaccaatcagatgtagatttggtcttttcacatagtcccatatttcttggaggctttgttcgtttctttttattcttttttctctaaacttctcttctcgcttcatttcattcatttcattttccatcgctgataccctttcttccagttgatcgcatcggctacagaggcttctgcattcgtcacatagctctcgtgccttggttttcagctccatcaggtcctttaagaacttctctgcattggttattctagttatctattcgtctaattttttttcaaagcctttaacttctttgccattagttcgaatttcctcctgtagcttggaatagtttgatcatctgaagccttctctcaactcgtcaaagtcattctctgtccagctttgttctgttcctggtgaggagctgcgttcctttggaggaagagaggcgctcggatttttagagtttccagtttttctgctctgtttttttcccatctttgtggttttatctacctttggtctttgatgatggtgatgtacagatgggtttttggtgtggatgtcctttctctttgttagttttccttctaacagacaggaccctcagctgcaggtctgttgaagtttgctggaggtccactccagacactgtttgcctgggtatcagcagcggtggctgcagaacagcggattttgctgaaccgcagatactgctgcctgatcgttcctctggaagttttgtctcagaggagtacccggccgtgtcaggtgtcagtccacccctactggggggtgcctcccagttaggctacttgggggtcagggacccacttgagaaggcagtctgcccattctcagatctcaagctgcatgctgggagaaccactactctcttcaaagctgtcagagagggacatttaagtctgcagaggttactgctgtctttttgtttgtctgtgccctgcccccagaggtggagcctaagaggcaggcaggcctccttgagctgtggtgggctccacccagtttgagcttcccggctgctttgtttacctaatcaaacaactaactcggcaatggtgggcgcccctcgcccagcctcgctgctgccttgcagtttgatctcgggctgctgtgctagcaatgagtgagactccattggcgtaggaccctctgagctgggtgagggatataatatcctggtgtgccgttttttaagcccgttggaaaagcgcagtattagggtgggagtgaccaaattttccagttgccatctgtcacccttttctttgactaggaaagggaattccctgaccccttgcacttcctgggtgaggcgatgcctcgccctgctttggctcgtgcacagtgcgctgcacccaccatcctgcgcctactgtctggcactccccagtgagatgaacccagtaccccagttggaaatgcacaaatcacccatcttctatatcgctcacgttgggagctgttgaccagagctgttcctattcggccatcttggctcctcccccctcatgtaaatattatcaaaacaagaggagaaggggtcaaaataatgttacacaagctacaagttaagttaaaaactgtcatactttataaagtgtatttaagtcaaaacttcaaaaagacaaagaaggacattagattcattcactgggaacctattacaaatttgtatatacatgtgtgtatttatgtgtgtgtgtctcatattggggtttcagctatataaagcaaatactaacaaaactgaataaacacaaagagagcaatacaattatagtaggatatttcaatactccactttctgtaataaaacaagagagaatattagtaaggaaacagaagactagaaggcagtaaaaaaacaattatttctaatgaaggtatagagaacactcctcgacaacatcaggatacacagccttctcattacctcatacaactttcttctttatagaccacctgttaggccaaaaacaaagccttaacacattttttaaaactgaaattttatagatcactttctatgacaaaaatggaattagagtataaaacaataatataaataattgataaatttaaaaatatttagaaatgatacaacacagtattaagcatgcacttgttgaaataactggctgggtgcggtggctcaggcctgtaatcccagcactttgggaggctgaggtgggtgaatttaactccatctcaaaaacaaacaatcgaaaaaggagtaatattgtgaagatgtctatactgttcaatttaatctacagaattaatgcaccatttttcaaatttctcattgcacttttgaataaaaacagcaaatccaaaagtatatggaatctaaagagttaataaagtactcaataatcttcaaggaataatgttggaggcattacaatttctgatttctaaacacatcaaaaagctacagaattaaaacaatttggtatgagtataaaagtgaaaaagtagaacaataaaacagaatgcagcacatatgttagctttcacataattattgcagcattgttactgaaagccaacaggttaaaacaatacaaatttctgtcatcaaatcattcagtaggtagaaaaatactggaatctcattcagttttcaaatagcagaaaatagtctaactattaagataaatattgatgacattatgcaaaataaaataagccagccagaaaaagacagagattatatgagatatgtaaagcagttatactcctagaaacagaaaacagagtggtgtttgaaaagtgccacgaaattggatgaattggtagttgtttaatgtgtagtgagatttagctttgcaagataaaaacattctagtgatgttgcataacaatgtctatataattaatatgaccaaactgaatatttagaaatatatacttgtcactctaactctcaggcaaaactgcagtggcattatctcagctcactgcaacctccgcctcctgggtttaagtgattcctctgcctcagccttctcagtagctggaattacaggtgatcaccaccacgcctggctaattttttgtattttagtagagacagggtttcaccatgttggccaggatggtctcaatcttctgacaccgtgatccacccacctcggcctttgaaagtgacgggattacaggcataagccaccgcgcccagcctagaaaattttattgttaattttgttatgtgtttttgacacataacgcataagtaaaaataaacaataatacctaaaagagatacagagtaattattgtttttaaattatcttcaaatccaaaaatgtttctctggcacaaaattaatatagattcaaaaataaatagacgctgaaattgggagagattttatgactactcacctagacaggattaaaaaaactgttacaggccaggcgaagtggctcatgcctgtaatcccagcactttgggaggccgaggcaggcagaccacctgaggtcaggagtttgagaccaacctgaccaaaatggtgaaaccctgtctctactaaaagtacaaaattagccgggtgtggtggcacattcctgtaatcccagctactcaggaggctgaggtaggagaatggcatgaacctagaagttggaggtttcagtgagctgagatcccaccattgtactgcagcctgcataacaagagtgaaattccctctcaaaaaaaccaaaaccaaaaccaaaaccaaaaacctgttacaccatacctacaaaacaaatatacaagtgacacaaagctacagggataatatttatacaggcaaagaaacacagaaacaattatattggcaatagatacatggctttttcatatttaattttgctcttcactgtcttaaattgtacagttaaatattgttacatacaattataaactaaaaaatatattgttatatacaattataatataaactaaaaaatcaacacataattaaatgatgtgatgtgacattcccaaaaatatataacacaaaatattaaattacaaaaaaattaaaacatgggatgtaaaacaagtagatcaatgtattcatgaaaggactcttaaaatataaggtaaagtaatacagaggttacttgaagatttaaaaaaaaaaagctgagaacttcccaaattttgatgtaacaacaacaaaaacttctaaccagtaatactcgattcaaaattattttacttcaaaaagaatataaaaataaagactttccaaaataaaagttgagactgttcatcaccattggcacagtcctacaagatataatatacagggttgtgctccctggctcacgcctgtaatcccaacactttgggaggccaaggtgggtggattgtctgaggtcaggagtccaagaccagcctgaataacatggtgaaacaccgtttgtactaaaagtgcaaaaattatttgggcatggtggcacattcctgttgtcccagctactgaggaggacaaggcaggagaatttcttgaatcaaggaggtggcgactgtaatgagccaaaatcatgccacggtactccagcctgtgacagagaaagactccatctcaaaaaaaaaaaaaaaaaaaaggcccagtgcaatggtgcccaccacactccatcctgggccatagagtgagactcaatctcaaaaaacaaaacaaaacaaaacaaaaaacaaaatcgaaatgattattcataaaacctttaaagttcttttatagaatataaaaaacaatatgtaaatgtgcataaatcggctgggcgcagtggctcatgcctgtaagcccagtgctttggaaggccaaggggggaatcacaaggccaggacttcgagaccagcctggccaacatggtgaaaccctgtctctactaaaaatacaaaaattagccgggcatagtggtgcacacctgtaatcccagctacacgggaggctgaggcaggagaatcacttgtacctgggagatggaggctgcagtgagccaagattgtgccattgcattcctgcctggacaacagagtgacactctgtctcaaaaaaaaaaaaaaaattctgcctaaatttgttaatataccatataaaataattttaatatcaataaaaaactggaaaatgtagagacatagtttttgtattaaattgaagttgttataaaattaaaacatattgttttaactttaagatgtatgtaatctccagctttcaagatgattacaaagataatatttatagaaagtgtgcaaaagaaaataaaaaataatgcatgccagtacaaaattaaataaaaattaagaaagtaaaacaggaaatgagaaaaataaaactactagaaacacacaaaacaataataacgtaactggaaataacaacttcatttctttaagcaatcattttaaatataaattaattaaactacttaataaaataaaatgtaatcttaggactttggaaggccaacgtaggctgatcacttgatcccaggagttcaagaccagcctgggcaacatggcaaaactctgtctctacaaaaaatacaaaaaagctatttgggtgtgatggcacatactagtaacccagctacttgagaggctaaaatgagaggataatctgagtttgggaggtctggatagcagtgagacatgcaaatcagcctggttgacagagtgaggccctatttcaaaaataaatgaggccaggcgtggtggctcatgcctgtaatcccagcactttgggaggccgaaatgggcagatcatctgaagtcaggagttcaagaccagcctggccaacacggtgaaaccctgtctctactaaaaatataaaaaaattagctgggcatggtggcgggcacctgtaatcccagctactctggaggctgaggcaggagaattgcttaaacccaggaggtggaggctgcagtgaactgagattgcaccactgcactgcagcctgggcaacaagagcaaaactgcatgtctaaataaataaataaataaataaataaataaaattatatagagaaaaagaaatagaaagcctgagtggtttttttaaaaagcaatcagtatgctgcctataagagactcattttagcattcagtcaaataggctgaagtaacagaatggaaaaacgtatattccatgaaaatagtaaccacaattgagtggggtagtcataattagacataacatgctttaagtcatgtactactatgagacaaagactgatattatattatgacaaagttagttgatgtagcagaaatctataactataatatttatctttctatatgtatatgtgtatataacatcagggctccaaaatacataaagcaaatattgacaaaagtgaaggaagacatacatagcaacataatcattgtagacatcaagaccccatttgcagtaaatggaaaattcagaaaaaaaataagaaacaggaaacttagaaaacattatagactatgttatttattttgcaaatagaggaataattgagagtacgttatttataacaaaaaggggtatatttggctcacagtttggcagactgtataagaagtgtgtgtcaacaactgcttctggtgaagatctcaggaaacttacaatcatggtgaaaaataaagagtaactggatgtattatatggtaagagacagagcaagtgtgaggtgaaggagccaggttcttttaaggaacctactctcatttgaatcaatagagcataaactttttggttaccaagaaaatgtaccagccattcatgagaaatttgcccctgtgacccaaacatgtcccaccaggtcctacatccaacattaaggatttatactgcagcatgaggtttggagaacatggatatccaaaccatattatagaccaactaggcttcacagatgcatacaaaactttccagtcaaaaccaagataatacaaaatattcttatttgcatctggtgtattctgttaggacacataccaagttttattaaattcaaaaatactgattgggtgaaatggctgttgcctacaatcctaacactttgggagatcaaggtaagaggatccattggtgccaaaagtttaagaccagcctgggcaacgtagtcagatccgaacactacaaacaaaccaaccattaaacagacatctagtgcgtatctgtagtcctagctactcagaaaactgaggtaaaaggatcacttgagcccaggaggctgaggctacagagagccaaaattatgccactgcacttcacacgaggtgacagtaaaatcttgcctcaaaacaacaaaaacaatcatttaaaaaagactaaaattacacactgtgtgttttctaataaaaactgaatgaaactaggaattaaaagcaaaagtcaaactggcaaattcaaaactgtgtatatgaaacacactcttcaacatattcttgctcaggggtcaaaaaatttcatttttcacaaaatgtcaataaaatctagagttaaaagctacagaacataaacaatgtgatactgacacaaagataaactgatgaaagaacagaatggagagctcagaaatgaacccttctgtatatgatgaaatgatcttccacaaagttgccatgagtaaaaaatggagaaaaataatctcttcaaaaaatgatgttgaaaagtgaatatcaacaccgataaaataaagttggattatttccttgaatgttacaaaaatatatttttaataaaatattatttaaaatattttaattttttaatattaaattcaattatttaaataattaaattattaattttaattattaaaattattaatttaattattaaaaatagtttaataaaataactaacaaatcttttaggaaaaaatacgggaaaaagacatgacactggtttggcacaattttcttagatacaaaattaaatgcctgagcaacaaatgaaacagaaaagtttacactagacttcaaaatttctgcatattagaaacaattcaagagtaacaacatcccttagaaaatgggtaaaacatttgcatattacatgtgacagaaattaatattcaaaatatataaacaacccttaaaactaaacaatgatgaataacttaatttagaaatggacaaatgaaatttttattagaaaagtacacaaatgagaaaaagcatttgaaaggacacagaaaattactagtttatagagaaatgaaaaaaaaaaacacaatgacaaacaaaatcacctcacacacattagaatggccactataaatttttttaaaaacaccaaatctgttgatgatgcaataaaaatgaaacctaagttgaatgttggtggataacaaaggtgcagtcattattttaaaaagttataaatgtttctcatttataaatctatatccaaaatacgtaaaaaaagccaggcacagtggctcaagcccgtaatcctagcaatttgggaggccaaggtaggggcagatcacctgaggccaggagtttgagaccaggctgtccctgtctctactaaaaatacaaaaaactagctgggcatggtcgtgggcgcctaaaatcccagttacttgggaggctgaagcaggagaatcgcttgaacccagaaggcagagattgcagttagacgagaccacaccactgcactctagcgtgggtgacagagtgagactccatctcaaaaaaaaaaaaaaaaagcaacacaggacctggaagacatatttgaaaatctatctttattataccagtattcaaaaaagccaaaaggctgaagcaacccagatgtctcttgatttaaaaatacgtcaaaaaatataacatatacataaaatggaatattattccaccttaaataaaacaatcttgtcacattttaagataaacattgagaatattatgtcacttgaataatccagtaacaaaattatggatactgtacgattccacttatatgagataccttaagtagtcaaaatcataaaaatagaaagtggaaattttgtctgtcaagggctggagagagggtaaaattagcagttgttatttcatgggtattgagttttagttttgcaagatgtaaaatttctaggagtcttttgcataacaatgtgaatatacttaacatgcctgaaatgaacagcttgtttattttgagacagggtctcactctgtcacccaagctggtgtgtagtggcacaattttgactccagctcaatctcccatgtagctgggaccacagctgcacaccacgatgcctgactcttattaatttttttttttatagaaaggggtctccatatgttccccaggctggtctcaaacttctgggctccaggaatcctcctgtcttggcctcccaaaatcctgggattacagaagagagccacaaccatgcctggccctgaaatatacacttcaataaatttaagatggtaaatgttatgttacgtgtttttaaaacaatgtttaaaaaaaaaaactgaaaaaaatccagaattattaatctttttgaaaattaccttcaaatcacaaaactgtttctctcacaaaaggaaatatatattcatcattaaacccatgttgaaaataagactatcttcatgactactcacttagacaagataaaactaccatcaaaaatcagctaagaatataagataagccataactaaaactggggtcatatttatagataaacacacacatacatatgtaatctgattgtgatagacacgtgcaatttatctcttaagcctcaaatggacttaaagtgtacaaacagaattgcaaattctctaaaattataatacataagtaaaaccaataggcacaataaactgatgttaagaaacctacactgagaccaggcgcagtggctcatgactataattgcagcactttggaaggccaaggtgggcagatcacaaggtcagaagtttgagattagcctgaacaatatggtgaaacaccatctcgaataataatgcaagaattggccgggggtggtggcgtgcctgtagtcccagctattccggaggctgaggcagaagaatggcttgaacttggaaggcggaggttgcagtgagctgagatcgcgccagtgcactttagcctgagcaacatggcgaaacttcctctcaaaacaacaacaacagcagcaacaacaaacaaaaaaactacactgaagaaacatgctaatacagaacttcaaacaataagacaaatgtttactcataaaatctggtgtaacacatggaagtatcattacgaaaatttgtcaggccaggcgcggtggctcatgcctgtagtctcgcactttgggaggctgaggcgggcggatcacctgaggtcaggtcaaccagtctgtcaacatgatgaaaccccatctctactaaaaatacaaaaattaccaggcatagtggcacatgcctgtaatcccagctacttgggaggatgaggcatgagaactgcttgaacccggaaggtgaaggttgcagtgagccaagatcgcaccactgcactccagtctggatgagagagggtaactccttctcaaaaaaaaaaaaaaaaaatttgttgaagtaactgcaatctttaactagtattatgtactcatcatatacaggtattttgaatcattggcatgcactgtgtagcagtaaaattttgagaatatgcagtataattataaatagattctaatgagaaacttaataaattagcatttaaaagaaactggagtttctttttatgttttaaatatatgctattcttacacaaaacgaaactgctgtattctaactttagaagcaaagaatagccttacattgttaaacacagaaaaaaatatatatatattttggagaatagggttagaccctctgatatgtaaaacaaatattaggaaataaactcattatttatatacagggtgaagaaagtagatgaaaattccataattttataactacttataactagtaactatgtttatatttagtaactattttcataaatatggagtgcttactaattatctaatttactttcagcataccatgcaaattctagcatattatcctaaataactgaatctaaaattacaaatttgaaatagaatatagaaagaaaaaaggtataaggagagtgacatcagtaagatgaaaataataaaagtgctctattttcatatccccttatagcaaaaaaagtcagccatccctgaccaaaaatgactttatgagacaaccaggcattatggttcacatctgtaatgacagctacatggtacattactgttggagagaaatgcttcaggccaggattttgagaccagccttggttatgtagcaagacgtcatctccaaaataagtgcctctaagagagatgtgagatccagggatgcagttgtgaaaccctattaaagctgaagttcgagacgtgttctattcagaaggcaggccctcattcaggtgggaaattacaggacccctgttcttggctacagaccaggatagggttcacccaacttggtcccactgagaattctgaacttactctgtagccaccacaaactcctcccaagccagagtctggcagaggtcctgctattccagagacctggaggaaggcatctatttacagccatgtaggcaggcctgcataccttggcctttaccatggtccctgaaacagttcactgactcagtttccgttacacgagccacagttcatggtcagtcctgcctatatagaaacccacacagttacctgaggaaatgctctctggtactcactgaaagccacactcatccacatcctgatttaaggcccagcatctgcagacctgactgcaaaaacatgccctagtgtctgccctacagagcaaagtcccgaaggatatgcagtctgtccaaaaataaaatggaaattacaactacccaagcccctgtaacaagccaactgaagatgaaacctaatggagacccagcagccttgtgaccaagctacaacccctcttcactacaaattcagagggcatctcatcaccctaagggcccaataaaagaaaatctttacaatctaaaatcagtttatgaaaacttgaagaggtgtctgctccatcaaattcaaacaccaatacaaaactatattgtgcccattttcaatgcttctattttaatgtagcactggaagtatgggcagaagaattagtcaaagaaataaataaatccattgaaattaaaaaataagtaatcttatatttaaaaaaccataaacagtacattaaaacctctctaaactaataaatacactcagtaaattagcaaaatataaaattaacatacaagtatatctatggtttcatacacttaaactatctgacaaaatagaggaagaaaattttattgactataccttaaataataaatttctgaggaaaatattaaccaaggaggtaaatctttacaataaaaaaaggaaaagttagaaaagatacaaataaattttaaaatattttgtctatgaattgaaaacatgaatattattgaagtgccatattatccaaagtaatctatagattcaataaacttcctattaaaattgcagtggtactattttcacaataatggaaaatacaattcaaaaatttacatgaaactaaaataaactttgaatagccaaagcaatcatgaggaaaataacaaagaggaaggatgtcataatttcaaactatatatttcaagcctagatagtaataaaaacagaatggactgtgcagaaaaatgaacaaaaaaaaattcaacagaaactattactctcagacatttcagatctgatgcaaagagaactttgagagtaattttagtttctcaaaatcatgcagacatttgtgcgtcccaaaaattatggaaaagcagccacactgtgcagtctcttatatgtcatgaagaggactttggctctcactgtgaacttgaaggaagctcactgaaagaaaaggaaaatccttagagaatttaaaagcataagacagaagatgcccctttgtaagcaaaattaaaaaagaaaaaaccaaacaaacaaacaaacaaaaaatagctgcccaagaactatttcctttggaacacagctccccaaatcacactttaaggactggctttctctttgaccttgggaccccttatctgtgtcatctgttgtattcattttcactcacacctacctgagggtttggctatcatctcatttctcttcatggtcaaaggttttcttccttgctccagacaggtgatcaggtctggcttagaaacagtaatacctgttttattaaaaataaataacataaatcttgcttatgttctccaattacaagctagtaatgtgctcagcacagaggatgtgataaaatattctagtaaattaatacaaaaatactaagttgtaacagaaatttttaaataattagaaaatactttcaatttgtaggtttcttaattttactacctggtgctactgaatcaaaaattggtggtggcaattagattttcaggtggagcaacaatattttatgccactaaatttctggaattaccactaatttagagtgaaaaatacagctcaactcaggaaagtggaaagtttggattaagataaaacatgttgaagaaattcttttctaaacgaacaaattctgaagattttctggaaaatggggatctgaaactcttttatgcaaagaataaattactaaaaaacattctacaaaaaataaataaataaaatctatagggtatattatgtactcaagttatcctcaccaaggaagaccaggttactgtagttctctaacatcacattcctatataaattccgctgtgcagtgtccaggcaatgccactcctccagagagaattctatggccacatctctaaattgcaatggtccctgaaaaacacacacacacacatttttaccaagtggccatgggcggaatttttaatttgacttaaggtgaaataagagagtaaagagaactggttctgacttataggactgactaaaattatccaataaaatgatttcaaaacagaaatattctctaatgtattctctaactctgagaagaaagagcagcataagatccacaacatcaattcatgtatgtttctagataataaagtataaaattaagggcaagaacaggaacatgtaaatttttcagtgctatagttacattatacagaatgagttgtgaatatttttcagatggaaaagacatgtttagttagaaggcatctctaaagttttaatatgtacaataagctgaagacatcgttatgcaggttttttttcccccagaagatctggaataaagtctgatttatttatttatttatttatttagagatggagtttcgctcttgttgcccaagctggagtgaaatggtgccatctcagctcaccgccacctccgcctcccgggttcaagcaattctcctgcctctgcctcctgagtagctgggattacagacatgcatcaccgcacccggtaatttttttcgtagttttagtagagatggtgtttatgttggtcaggctggtcttgaactccctacctcaggtgatctgcccactttggcctcctaaagtgttgggattacaggtggagaaaccacacctggccaatgtggtgaatttctaataagctcaacagtaatgccaatgtctttggcccaagaaggatattttgtcaaacatttagtaagtggaacagcctgtgtttttcccactttttctagcctgtaaacaaacagccctcatttaccaaagaaacatgtgtagaaaaaaaaataaggacagttgccagattaaatgtgatggtttatgcacatcagctgcataaagatacgtaataataaagaggaaaaataattaactctatagtgaaaaaaatatgtcccagagatctttaaccaattaattaatggttaatgcattaactgttaactgcactaggacaatggttttttttttttttttttttgagacggagtcttgctctgtcgcccaggctggagtgcagtggcgcagtctcggctcactgcaagctccacctcccaggttcacgccattctcctgcctcagcctcccgagtagctgggactacaggcacccgccaccatgcctggctaattttttgtatttttagtagagacagggtttcaccgtgttagccgggatggtctcgatctcctgacctcgtgatccacccacctcggcctcccaaagtgctgggattacaggtgtgagccactgcgcccggcctaggacaaatttttatgatgtgctaatgcacacagaagaacacagcatcactgttgtaatattcctcccaaaaaaagtaaattatagtccgaatgtaaccataaacatcagttttaggccaggcatggtggctcatgcctgtgatagcaatttgggaggctgcggcgggaggatcacaaggtcaggagttcgagaccagcatgactaacatggtataaccccatctctattaaaaatacaaaaattagccgggtgttgtggcaagcacctgtaatcctggctactcagcatgctaaggcagaattgcttgaacctgggaggtgaaggttgtggtgagccgagatcatgccactgtgctccagcctcagtgacaaagccagactccgtgtcaaaaaaaaaaaaaaaagaatcatcagttgtatacaaactttaaaatacagaaaactctatgttcagtaacttttagtagtaattttaagtaggcttcatttagcatcctaaagagcaggtatctcctaataatttttttcagaactttctgggtaataaatgccatcccatttaaataagcattttcttcttcttcttcttcttcttttttttttttctgagatggagtctggctctgttgcccaggctggagtgcagtggcgcaatctcggctcactgcaagctctgcctcccaggttcacgccattctcctgcatcagcctaccaagtagctgggactacaggcgcctgccaccaagcccagcaaattttttgtattttagtagagacagagtttcaccatgttgaccaggatggtcttgatctcctgcatgatccacctgcctcagcctcccaaagtgctgggattataggtgtgagccacggcacctggcctaaatcagcattttcttaatcctcttctgcatagagctaatggaacacacagctggagcctcaacattacatgttctccatctttactaaggaccacagttttccccaatagaaatcttgagtatccacatctttccatgttcaacagccacaaagggaacatttttaatattgcagatcataaattcttgctgagaattctgcatggcatataagaagctatgatgcggagaataaggagaaggctctgaaatataggaaagaaatatttttcagactcttgactatcgtaagaatttaaagaagtaattaagccaaactcattagggaggaaaaacacaagtagacaagtaaaggtttgtgagtactaaacgcatggcagtccaggaggcagagtcgacatagctcttcatctgacacatgtttacctgaagaaaagccacttttttttctttctcctccttctctggattccttctcagatgagattctctagacaagttacacctgttatcttgagactatgtctttaaaggtgtcagtaccacatgtttacctgctagcataacatcaactggcagaaaaataaagacagaaaaagtccacccatttctgtcctttacaacagaagacattcaggaacaatgagctgctccatgaagataaaaatataaatttctctttgctgtcctcagatgctctcccctgccacggacaccagccatttctgctacagtaatggaaataagcgccacactgacttgtccctaccaaacgcaaacagaacaggccctgtgaccaccctttagggcaaaggtggaacttaactctcatgaatgtattttgaacccctcatacttggttctggtctcaccttagagtcacataagggactccatggatgcttccacccagaacaataaacagaagctgtgcggaggacacaaggaatttctgcaaattggccatgtgattctaatgagaagcctgggttgataaccacggagctaagcattttctctcaagctttaatgagcttataaatcacttggtaattttggccccaatttatgtaatgtgactctggaggtttgaaaagggtccatgaatgggtgttttaaacaagttccctttcaatgctgatgttgctccccccgccccttggcgcattagcattagttagagaaagcaggtacagcacaaggtctcttattacttagcactcttgtcacaaccaaatacttctcgtacaaataaggacaacccatctccatccaaaagttttatatcctttgctggttctttaaagtttacagaaaaaacagaaggcagcaatgtctgaagaagtctggatttaaaaaacaacatgtacacacgtactaatgcaatgtttattaagcaggtactatgtgctcaagagtatgatacagagcactgtgctgggcgtaacatattacgtgatttaattctcataacaccctgggagccggtactaagtgtatgataattttcaggatttaggtaaagggcccaggatttttattgcttcttctgtttctctgccatcaaatttgttaaaaaaaaaaaccataaaaaattaaaactaaatatagacagatgaaagaaatatggaaggcaagagtttaatgtagttcagagaaaattttattctgtttatatttacatttttgtgacttgtggagcaattactggatatgcaagaatggaaaacaagtccctaaatagaatgtctctgcaaacactggttttaatataaaatttaaaaactaagaccctataacacataatttatttttcccatttatctgcttttggatttcaggaaattctaagcaccagctctagaaagacaacaggattcaccagccaaaactctgacctcttctacctgtgagacaagactccagggtagggtcagacgtaaataaggcctccaaaaagggtgaatctcaacagaactgggtcaggaagtggaccctatgtagaattctgttctctatgtcactggggtatttccagttttgttttttctaaacttacctaaaataaacttaaatcccagagtctgtgtaattttaatcttttccagccactgccctgtcaactttatattatatgctaatatgcaatttaaacaaatcccttaaggttttcaagggtaagtttattaggaaacaaatatgttcacttaacaggatgaaagaaatagaaatacggctgggcctggtggctcatgcctgtaatctcaacactttgggaagctgaggtaggtggatcacgaggtcaggagttcaagaccagactaaccaagattttgaaaccccgtctctactaaaattacaaaaattagctgggtgtggtggcaggcacctgtaatcccagctacttgggaggctgaggcaggagaatcacttgaacccaaatgtcagagtttgtggtgagtcgagattgtgccactgaactccagcctgggtgacagagggagactccatatcaaaaaaaaaaaaaaaaagaaattataacaacaattcttctgttcataaatatcctttcaagtacagacatcagaagtcacaacaatataaagtggcaaataatgtccaatattttggacatatctatttgttataccaaccatatgatgcataattcaagtatttatctagttgctagtctagactaagtttctggattgtaggaaccatggctgcttcatgttttattttaacggtcatatgaaatggaagctactagtttatctgtttgggtctccagatctcctccttgtttatcatcccagtaccaggaaactggagaaactctcatctgggtaccaacctaagacacctcttgtatgaggggatgaacaaacaggatgattcatttctcttacactgagaaagaagcagaattaaccactcttgtcagcctgacacaattctgctctggacatcctcaaatgtctcaaagaccactagatgattgtgagagaattcccagtgacctggggctggtggcccaatgataagccaggctagagactcaggctgattctaaataggaaatagaactgccttggtggagctacagaacctggatcacctgtcctgatttgctagctcttgtgtaagagaaagaacacaaatactctactccagtatcacattttacaggtaaatatagttgtggtcataactggatattttgtggccttgttctctcactcttaagatgctttttttttacacttacacatattctgtcatcagattctatttccttctggaggttctcacatcactgtagcaggtcaatgaacaagatgtgaaaaatctcacagaaccacactcccaaatgggagctgtaagctgtctaggttgacatctcacaatgcagaaaatgccttttcttagttttctgtacattctctatccaaagtccggtccttttttgtaaatcccaggcagaggccagatgttatctgcagattctaggtaggatccacctggctctgcatcctttggtgttacagcaagtggagtacaaacgaaggagagatcccccccatagaggctgctctagcacattctaaatgataagtctacatgaaaaaaaaaaaaaagctgacacaacatgaatataagtagacagtttatttgggtaaagtttacagattatatataacctgcgagcaaagattaaagttgcctggaatctacactttgagtagcagcatttacaagaagatttgtaaagacaataagagaaacacagagtgggcaaaattgtttgtcagaaatttctatttatttacaaaaataacattgattattgattagatacatatcattatagtttagggtatgggatatagtgtccaatgtagcattattagtttaatttatagctacatgtggcaatagtgaacagtctcaaaagatgaatacagaattcaaagggaggagaaagacataattgcacttttattttaacgtctctgagtttgataactaaaaggacttgcatttttcagataaaagttttttaattcccaaatctcaagacctggattcaaaatatggagctgcagatttagggcttgagtggctggagtagcacgcatgttacctgcacatttgtgagctttttagcaagagaaggaagaaagaaatggagattttcttgtctacatgtctactcactacacacgttactctacttgggtttgttggccccatggtctctgaatcagtttcaggtttgaagataaaagagtcactgaaagaggtaaaatgattgattgctgccctgtgaaatttatagaaatctgatctagactctctagaagtgactgtagaggactatagataagaaataggcagaaacacaattcggcctgcacatttagggtatggcatgcacttttctgcacaagtgtgaatttactggaagcctgagagggaatgtcccctcgagtaaattctggttggcccttatgtgtttatatcatgtctggtaattctagactgtttggaaacaataattaaaagaaaaattttctccagccccagagaaactccacaataacagaacagaaagaaaatggttttattacacaattaaacttgaatgtgacatgcatcagtcaatctgcttaagagactgcaaagatagaaagatggtcaccataattagttcacaagtagaagaatttccagcaccatgtcatacatagttcatcctaaattcacctggagattgaagaggacatctgtgtatgctaattacttatattcaatgacaaataaacttttcacctctttataacaggtggtagtttagcaggataatcgcttgaacctgggaagcagaggttgcagtgagcccagatagcaccactgcactccagcctgggggacagagtgagactctgtcccctgccctcccagcaaaaaaaaaaagaaaaagaaaaaaagaaaaagaaaggaaaagaacagggacatattttcagaagaattttataaagtttcatttccatctctgctgttctctcctctcctagccattgaatgggggtctatattgaaatacatcttacaacttccaacaacacattttgatgaaaaaatagaatctgactgtgttcatatactggaatatattagaacttgcaacatagctaattgaagagctactatagtttttgggtggccacatcacctgtctttatttgtcctgtaacagcagcatacaaatttagtgaaataaaagatactaaaattgtgtttcctcataattatcctgaatgaataaagtaataaacatgtctgactaatatctactaactgtaacaatttggttgtaaatattctttggatattagatataaatatctaagtatgaacaattttaatgaactagtcataatgtatgtagcattaaaaaaattaaaaccatacatcagttaggctgggcgcagtggctcaagcctgtaatcccagcactttgggaggccgaggcaggtgaatcacgaggtcaggagttcaaaaccagcctggccaatatagtgaaaccctgtctctacaaaaaccatataaaaaaattagccggacctggtggctcacaactgtactaccagctacttgggaggctgaggcaggagaattgcttgaacctcggaggcggaggttgcagtgagccaagatcgcaccactgcactccagcctgggcaacagaggccaggcgcggtggcttacactgtaatcccagcactttgggaggctgaggtgggcggatcatgaggtcaggagattgagaccatcctggctaacacggtgaaaccccgtatctactaaaaatacaaaaaaattagctgggcgtggtggcaggcgcctgtagtcccagctactcgggaggctgaggcaggagaatggcatgaacccgggaggcggagcttgcagtgagccaagatggtgacactccagcccggacgacagagtgagactccggaaaaaaaaaaatccatacttcagttaaaacattttatatttcaaaagcataaataacagtattaaaataaccatttaagtgattaattcaaagtaaatattgtggctttgtattcatactattttagaaaatactgtttatggctcacgcctgtaatcccagcactttgggaggctgtggtgggtggatcacctgaggtcagcagttcaagttcaagctggcaaacatggtaataccccatctctactataaatacaaaaattcagccaggcatggtgatgcatgcctgtaaacccagctactcagggtactgaggtaggagaatcacttcaacctgggaggcagcagttgtagggagcagagatcacacaactgcactccagcctcggcaacagagtgagactgtctcaaaaaaaaaaaaaatgaaaatatggtttaatttatatgaatgcagattatctacaaagataactgctaattgctctgaaataataaacagaaagcaaggtacaactacagactcaactgttcagtttataccctgaactgttcttgctttcgcagtataagtacttcagcctgcaaatattggatagttaccttggattatcaggtttctgtcaaagaaactgagtatcatttagtctttattattctgtattgctacctttactcctatctttgtgctaagcttctgtgtgctcttaaaatgagcttgtatctaaacaaatctgtgtctaccttaaaggaataaaaatcaaaaaaataaacttttcggaaccaaaaacaaagcaatacatcttaagtacttataataatctggagtcagaaaaaatgacaaaacttttatttagctgttgacatgatttacatatatttcaaacaagcagagaaaaatatctacatatattctaaatcccttaagaaaagagggaatagcggccaggcacggtggctcatgcctgcaatcccaacactttgggaagccaaggcaggtggatcacaaggtcaggagatcaagaccatcctggcaaacatcgtgaaaccccgtctctactaaaaatacaaaaaaaagaacaaaaaaattagctgggcatggtggcgggtgcctgtagtcccagctacttgggaggctgaggcaggagattggcgtgaacccaggaggcagaggttgcagtgagccgagatcgcgccactgcactccagcctgggtggcagagcgagactttgcctcaaaaaaaaaaaagaaaagagggaatagcaaaatttttttttggaactttttgaagagtttgaactcttggacatctgaaattagcacactgtatgcacttgaaataatgtttacaggggaaaaaccagaagagagaaagatatatgaaatccgtaagtgcacaagaccaacacaacagaatagagagcccagaaataatgtcaccctcctacactcatcagatttttgacaaagctgacaagaggaatatgggaagaattctctctttaataaatggtgcaggaataactacctagcactatgtagaagactgaaactggaccccttcattacaccatatacaaaaatcaactcaagataaattaaagacttaaatgaaaaacttaaaattataagaaactctgcaagataacatagagaataacattctagatatagacactggcaaagacttcatgatgaagctaccaaaagcaattgcaacaaaagcaaaaactgacaaattggacctatttaaactaaagagcttcttcacagcaaaggaaactataaatagctcaaacaaacaacctacagaataaaagaaaatatttgcaaacgttgtctatgacaaaggtctaacatacagaatttattaagaatttaaacaagtttacaagaaaaaggcaaacatctcattaaaaagtaggcaaataacacgaacagatgcttgtcaaaagaagacatacatgtggctaacaagcattattaaaaaaaaaaaaaaggtcatcgctagtcattagagaaattaaaagaaaaaccacaatgagataccacctcacacccatcagaatggctgtttttcataagtcaaaaaataacagatgctggcaaggttgcagagaaaagggaatgcttatactcttctggtgggagtgtaaattagttcaacaacagtaaaaagcagtgtggtgattcctcacagaactaaaaacagaattatcaatttgacccaggaatctcataattgggtatatagccaaagaaatataaattattatattataaagacatattcacatgcatgttcattgcagcactattcacaatagcaaagacgtagacaggccctgaatgcctatcactggtagacaagataaagaaaatatggtatggtcagatgcggtggctcatgtctgtaatcccagcattttgggaggccgaggcaggtggattgcctgagcttagaagtttgagaccagcctggtcaacatggcaaaatcctgtctccacagaaaatacaaaatgaaaaattggccaggcatggtaatgcatacgtgtgtagtcccagctacttgggaggatgaggtaggagagaactgcttgagcctgaaagatggaagctaaagtacgccaaaatcatgctatggcactctagcctgggcaataagcctatctccaaaaataaaataaaataaaagatttagtaaatacaaaatatggtacataaacatcatggaatactctgtggccattaaaaaaaaatgaccatgtcctttgcaataacactgatgaagctggagacaattattcttagaaaactaatgcggagtccaggcatggtggctcacgcctgtaatcccagtactttgggaggccgaggtgggataatcacctgagttcaggagtttaagaccagcctgaccaacatggagaaacccctctctactaaaaatacaaaattagctaggtgtggtggcatgcgactctaatcccagctacataggaggctgaggcaggagaattgcttgaatccaggaggcgaaggttgcggtgagccgaggtggcacaattgcactccagcctgggcaacaagaacaaaaatccatctcaaaaaaacaaaacaaaaaacaaacaaaaaaaagaaaattaatgcagaaacagaaaaccaaatgcatgttattatttataagtaagagctaagtaataagaacacatgaacacaaacagaacagacactgaggcctagttgaggggggagggtgggagcagtaagaggatcagaaaacatacctgttcggtggtatgcttagtacctcagtgacaaaataatctgcacttcaaacccccatgacgtaattttagttgtataacaaacccacatgtgtacacccaaccaaaaatcaaagctaaaaaaagaaaaaaaaaaaatccctgcgtgggagagagtgcaatgtaggtgaatggactgattttcattacagatagtggcccaggtggggctgttttctgatttatctttgtttgcatgcagacagatgagattataaccgggaggtccagaaccttaggttggtggaaaaaacaggttggtgcggcagattctgtatctaggggtggggatatgccaggagacctgtagagacttttgggttcttggcaagaaacgctaggatcaaaaatgccatggtgaagttcctgagggtggtgcccagtactgggaggagtgaggacatgtcaatgtctactgtgtgtgtttaggagtgggtgggaatcctgtggtggcagctacaagaaaacagggtctgtcatcagaactctttcctctaagttttcagtcttctgtcaccctggaagaagaccttaaatcacaggacaacaggcagtgtgacagcctgtgtacaggagagcagagcctcccattttcaaatacccagagctttgttccaggtctggccccagtgatatcttttttctggcaccaaatctatagagtttgctgaatatcaaacaattctccaacaccaactcattgcctaataattgaattctgacaccacctagagacagcacagaccctgatccagggctgggtcccacaacattgtcctcactgcagaggccaatcaaaaaccccataggcccatctatgcttctgagctactgtttgaaaactgaggactcccaaaacctccctgaagttcaataatttggtacagctacttacagaactcagcaaaacattgtagttatgtttaccggtttcatataaaagatgcagcccaggaaaagccaaatggaagaaatgcatagaacaaagagatggggaaagatgaaacacatagaaaatcctggaaaatatttgtgattaataaaattctccaccttttgtgtgctccaggaacagtatacggaaagaaacgcctttctcattatgacttagatggtgctctcttttcttacctatcacacagccagacacacactctgtacattttctcctttttctcattaagaaattcagctgaatttgtcttcagtggtcaaaataattttttttttttgagatggagtctcgctcggccacccaggctggagtgccttggcaccgtctcagctcactgcaacctctgtctccatggttcaagcaattctcctgcctcagcctcccaagtagctggcattacaggtggccaccacaactaccagctaatttttgtatttttagtagacacagggttatcaccatgttgaccaggctggtctcaagctcctgacttgcggtgatccgtccgcctaggcctcccaaactgctgggattacatgcctgagccatggcgctcagcctaaaatatttcttaatcaaactttacttaagtttatctccatccctcaggctagtgagggatggagataagccatctccaatgtaggagaaaagcccttttctgcctacatttttgcaacccatgaagattttttagttagctggtacttcttcctgttgcaatacttcttaggaattcattttttttttacataaatctaatattcttattttagaaagcgtaaaaagtgcctcaaaaccataacaacttcattaccagtaagaccctcccagtttcctttcatcttaatcttgactgcatctgcctgtggggccccagctttccaaggctttgtagcttctttcagaatgaaggctccttccgtggctggggtgagcagtcttgagatatccgcaagggagactccccagaaaaaaataacagggcctttaataacctcctgttggccgggtgcggtggctcacaccgataatgccagcactttgggaggccgaagcgggtctgaggcagagagttcaagaccagcctgacaaacatggagaaaacccgtctctactaaacaccaaaattagccgggcgtgatggtgcatgcctgtaatcccagctactggtggggctgaggtaggagaatcgcttgaacccagtaagccgagatcacgccattacattccagcctgggcaccacaagcgacactgtgtctaaaaaaaaaaaaaaaaaaaaaaaaataccctgttgcaggcttaatattagccttagcttggagtcactaggttcaagctttaatgtccacatcagttattcacttggtttttgaaactaagtgttagaaactccagtgaaattactcacaatgtttacataaaggaatttttaagatgcttactttttttttcttttttttgagccggagtctcgctttgtcacgcaggctggagcgcgatgattggatctcagctcactgcaacttccgcctcccgggttcaagcaattctcgtgcctcagcctcccaagtggctggtactacaggcacgtgccaacacgccgatagttttcgtatttttagtagagacgggtttcaccacgttggccaggctggtctagaactcctgaccacgtgatccacctgcctcggcctccgaagtgctgggattacaggcttgagccaccgcgcccagcaagaaaggggttttgaaccctaatgcagttcctgtttttgtttccatcccctattggctgggatcagaccgcacaatctaagctgatcctggtaagcttagacccaaactttttccaaataaagtaaatgcgcgatttgcgagaaaaggaaaagggggtagaagaagaggtagggttgatttacaacttttacaacttatgaccagaaagttgagtcatttaaaaggaacttagttgtcctaacacctctttacctcaagtgatccgcccgcctcggcctcccaaaacgttgggattacaggcgtgagccacagcgtccggccccatacatttttaataggagaaaagagaaactgtaaacccaaaggaacaaagctcttcccattcatgaacccgcaccccgagtcaggattctcccctgcccaccctcccctggtccctgcacaatctgggagagacgccacgctgcgggtgcagagctgcccagagagggctccaggccagggtagtcaccgcgcagtgaagagacaagacgcccgggtgccggctgtcagcgcagctgccattttatggctgaacaggactgaggccgagctgagcaaggagaactgggggagcagactgtggagctgactgcggggaggcctgagtcccgccacagccacttttcaccggttccaaccagtccctctcctctctcgggatgtcggaccctcactctcaccatttttggcttccaggaggtcccggtgtcttagctgtggatctcccaatacctgcaggacacggggccacacagcctgggcctttaggagaagaaccagacctggagctctgactgcagcgagagacaaaggccgcaccaaacccggaaaccgtcctcttcgctccagctgcgttcctgattggatggtttccagcccaccatccctgattggataatgcttaaggccccgccccctgaggccctgagtgacagtagatgtgatcagacgctgagctgagtgaagaaagagtgacagcctaagctgcagccttttcaggcagggcttccttcctgagctgagccaggcccaccccagagcatgggagaattctatcttttctttactctctctctttttgaatgtattcaaaaggtgaacagaagtattttgctctcatattaataatacataaaatttttgttcaagagaaaatcaacttttactttggcaataatgtattatcaatactaaaggtaattttgataaaaccttataaaaaatcaaatttgtcatttttgacctctcgagatttacatacatattttgtaatctaatgtaattttttaactttttatattttatttttatctacattctttttattttttcaatttgaaacaacctttaagtaatttcaaactgttacaagagacaaagaaatcatttagggccagtccgctggtgcacgcttgtaatccaagcactttgggaggccaaagtgggtggatcacttcaggtcaggagttcaagaccagcctggccaacatgttgaatctcatctctagtaaaaacacaaaaaattagccaggtgtggtggtacacacctgtagtcccaggtgctacggcggctgaagcaggggaatcgcttgaacccaggaggcggaggttgtgtaacggcctaagggcttcatcttgcctagacagagatgattcatcaagacaggggaatttgtggaggaaaagttaaatattaaatttgaactcagttgaacatggacacaaacaatggtcaccaagtcctggaacaggttatgtgagccccttgaggcattcacctgccgaccttcccctggtccctgcacaatctgggagagacgccatgctgcaggtgcagagctgcccaaagtgggctccaggccagggcacagtcacagcgcagtgaagaggcaggacttctgggggcctggctgtcagcgcagctgccatcttctggctgaatgggactgaggccaagctgggcaaagagaactgggcacagattgttttggagaaatctctattttaatctattcctatacgttagttattgaaaaacaatagccaatcgcaaaaaaaacaagttgacttttttgtgttccttgagcccagttgcaaagagcccagttgcaactgggcctcatgccaaacaacttgttacaaaaagagctaggatcccagactgcaccaaagctccaaagacctctccttgtctgtacagggatgggtggccgactctggagcccaggctgttgcttcctggtctgctgatgaatcctccatagtctggtgagtgtaaagatatatattttttctcttctccccttcccattgcaatgctcttattatatcaatttgcttattatatatgcattgccatttacctgggataaagcttgtttacccttaaaggtattgtgtgcgtgtcttttcttctcccctcatgtgtttcctgcacagaacatatttctcaaaggcttcatttgttcctttttattcatttttgtttaatcttgtctgcatgccttattttggcaaggtggtcttcaaactctgatgttctttcttctgcttggtcaatgcagctacaaatacttttgtatgcttcaggaggttctcatgctgtgtgttttagctccatcagatcatttatgttcctgtctaaaccagttattctagttagcagttcctctaaccttttatcaaggttcttagcttctttcaattggtttagaacatgttcctttagctcagcagagtttattacccatcttctgaagcctacttttgtcaattcatccatctcatcctctgtccagttctgcacccttgctgaagagacattttgataacttggaggaaaagccgcactctggcctttcagagttcttttgttgattctttctcatcttcatgaacttgtctagttttgatctttgaggctgttgacaactgaatggttgtttctgttttgttttgttttgttttgagacagagtctcactctgtcacccaggctggagggcagtggcacaatctcggctcaatgcaaccttcgcatcccaggttcaagtgattctcgtgtctcagattcccgagtagctgggattacaggcatgcaacacaacgcctggctaatttttgtattttttagtagagatggggttttgccatgttggccaggctagttttgaactcctgacctcaagtgatctgcctgtctcagcctcccaaagtactgagattactggtgtgagccaccatgcccggccttggatggggtttttgtcggtacttttttgttgttgatgttgttgttttctgtttgtttgtttttctttcagtggtcaggtccctcttctgtagggctgctgcagtttgctgggggttcacttcaggctctattcatctggttcactcctgttcctggagatgtcaatcaaggaggttggagaatagcaaagaagagtgtccgctccttcctctgggatctctgacctcaagaggcaccaacctgatgccagtaggatcgctcctgtatagggtgtctgacaacccctgttgaagggtctcacccagttgggtggcatggagaggagaacccatttaatgaagcactttgttccttggtggaggggagtgttttgctggggggaaacccactcatgtgggctgcccacatttttcagaactagcaggaggaaaggctaagtctgctggtccacagagactgcaactgtagcaggacgagccacagacaaaactcctcagacactgagttaaagaaggaagtggtttattcgaccgggagcatctggcaagactcctgtctcaagagccgagctccccgagtgagcaattcctgtcccttttaagggctcacaactctaagggggtccacgtgagagggttgtgatggattgagcaagcagggggtacgtgacaggtgctgcatgcaccggtggtcagagtgaaacagaacagaccgggaagtttcacaatgtcttttctatacaatatctggaatctatagataacataaccggttaggtcaggggttgatctttaactaccaggcttaggtcaggcaggctcaggcctggtttcaggtctggttccctggttttgtgtctggttttgtttcgcttttcttttcttttcttttctgagtacaaaacaatataaaacaatatgagagggtctgtctctcttctctcacagccaccccttcccctaggggctcaggtccagggacatcagaattctgtccctgagttcctgactggagctgttggagttcctgcagggaggcccagcccagtgtggagggatgagtcagggtcaggcctgaagagacactttggccgctgtctgccacagccagtgtgttgggctgtgggggacacctcttgagaccaagctgtccaacctccctggctctagcaggggaaaaatgcagccaggagctctagaaatggctgctgcccttcccgtgccgagggagcttagcctattaggcaactgggagtctcagtgctggctgctgtccctcctccaaggagctcaaaatgctgagactgcaggcagccacagccatggtgctggtcgcccctccctcgggacctcagcaggcttaagcagactctagctgagaggctgttaatccgttcaactccggggttggaatctgaggctccagtgccgtgggttcacgagcggaatcttctgatctgtggattgcacagtttcatggaaaaagcacggtttcctaggctgggtagcctgctcagtcaccgcctcccttggctgggagatggctgtggcaggactcaggcctgccgcactcagctccaaaatctgctcccggagtttttctcgcccagctcggcctctgttcccttcagccataacatgtttctcttccctgcgcagtgactgcgccctggcctggagccctctctgggcagctctgcacccgcagcgcggcgtctctcccagattgtgcagggaccagggcagggtaggcaggggagattcctgactgggctgcgggttcacgaatggaaagagctttggcccgtggggttcacagtttttcttttctcctattaaaaatgtatggggccaggtgctgtcgctcacgcctgtaatcccagcacttcgggaggccgaggcgggcggatcacttgtcaggagttgaagaccagcctagccaaaatggggaaaccccatcattattaaaaatacaaaaattagctggatgtgatggtgaatgcctgtagtcccagctactcgggggtcagaggagagagaatcgcttgaacccgggaggcagaggtggcagtgaggtgagatcgcgccactgcactccagtctgggcgacagagcaagactctgtcaaaaaaaaaaaaaaaaaaaaaggaagtcaccgcaaaaataacaagtaatttaaagagtgattcaagaattgtagagcacccagctacagtttgtagtttgtggtccatgggagaggcttgaagaaaagacatttataaggtgcatgatgaagaacactaaattcaataattggttagatatagttaggtagtttcttaatttgtacaatcaaggtggaaatttcctgattatgtaatcagagcttaattggcattttatagttgtttaagcttgaattgtgtttcccctaatgtagcgatttaccaaaaaatgcactcgagtttatatttttttcttagaagtagcaatccagggaatagagcctcttcagtctctcagactcctaaagtctaattgcctgccacttaattattttcacaccccacaggggactgattttctctggcatttttcacatgtgtcccaagtggggcctcaagtgtaccccatgttcctcaattaatcatttttaacactattaaataaatttgttttctgtttgtaaatatctcccctgagaagaaagaaaagaataatcccctgacactgtattgtaaaaatatttgtgcctctttttcttctatttttccagagaacttaccggaatgtttttaggtcaagattacccttcggaaactttatagggtgatgtgtcctcagctatccttcagttttttttctgggcctgggttttagtactttctggggataaaccaagatacccaccatggctatgtctgctggagtgtctagtgactattagctcttgggtcattttctcccataggaccacgtgaagtatggagtgtagcctctcaagggagcaggtggcagccctggggctgaaaggcatctcctggtgcacttttttttttttttttttttttttgaaaaactaactccttgagacatgaagattgtcttcaaccaacctagcttccatttcttggagacacattgctgggcagccaatcagatgctgatattgaggggaaaacagataatttctgccccctggattctcttgagtggggcagaaaaatagtgacaaaaaatagtgaaaaatttggaaaaaaaaaaaaaaaaactccaacagacaaaaaaaactgaccccagtgtgatggcataaaaacttatgaagtaaaatgtacctggggcactcactggggcatagcgcactatctcctgggagggtggttattgagcatgtaagtgaacaggatgggataggtaattggatgtgtaccttgaaaagatttgttcacttattttgacctcaggtatttatttatttatttatttatttatttatttatttatttatgagacagtctccctctgttgcacaggctgtaattcaatggctcgatctcagatcactgcaacctccacctcctgggttcaagtgattctcatgcctcggcctcccaagtagctaggtctataggtgtgcaacactgcgccttgctagtttttgtatttttagtagagatggaccaggctgatcccaaacttatggtcttaagtgatccacctgcctcggccacccaaagtgctgggattacaggcattagccactgtacccagctgcatcggttttttttactgtaatttgcattttattcatagggcttaaaaggtaagaaaatatttacaaaggacagaaaagagatgagtttcaaaaaattggtatttaataatatattccatttattaataattctcatttacctttttctttcccagagtaagcttaggaattttttcagatgtgttttttatggctgagttatttcaaacaaaattccaagccttagctttaagaatgctagctaccagctaagcgcggtgtctcatgcctgtaatcccagcactttgggaggatgaggcaagcatatcacgaggccggcagttcaagaccagcctgtccaagatggtgaaacaccatctctactaaaaatatgaaaattagccaggcatggtggtgggcgcctctaatcccagctaccctggagcttgaggcagataattgcttgaacctgggaggcaggggttgcagtgagccgagatcacgccactgcactccagcctgggtgacagagtgagactccatccccatctcaaaaaaaaaaaaaaaattagagcaaatctttctttcattttgactgtggacaatgaatatatttccacaggaaaatgtggtagataatttatggattacatagattcgtcaaaacaccagttcctctttttgcagggtaaatttgtgacagtgaatatcttagttctatatcatgttgccttgatttcttagtttaatgctaaattatatatgataaaacttatgtaccttctacaagtgtccccatatgactaattttttacaacactatttttaatagaaataataaaataatacatgtattttctgaaagaagtagacatatttgcttttcttatggagatacaaaatgcaggcaccttagccattttcagtggttcacacctgcaatcccagcactttgggaggccgaggcaggttgatcacttgaggtcagggtttcgagaccagcctgcccaacatggcgaaaccccgtctctactagaaatacaaaaattagccgggtgctgtggcacatgcctgtagtcccagctacttgggaggctaaggcaggagaatggctagaacctgggaggcagaggttgcagtgagctgagattgtgccattgcactccagcctgggtgacagagcgagactccatctcaaaaaaaaaaaaaaaaaagtaagcaccttaaaatttccttcccttatgtaaacacttagagtaatttcactggatttttcaagcagttagtttcaaaatcaagtgaataactctgacatggaaattaaagctttaacctagtggcttgaatctaaggctaatattaagcctgcaacagaaggttattagaggcagagttagatttttttttttttttttttttgagacagagtctcacactgtcgcctcggctggagtgcagtgccaggatctcggcttactgcaacctctgcctcctgggttcaagagattatcctgccccagccttttgagtagctgggattacatgtgcccgccaccatacctggctaattttttagtatttttagtagagacagggtttcactatgttggccaagctggtctcgaatgcctgaccacgtgatccacccgcctcagcctcccaaactgttgggattacaggcgtgagccactgcgtctggccaaaggcccagttacttttttctggaaagacttccctgcagatgtgtcagcctgctcaccccagccattgaaggagccgttgttctgagagaagctacagcgccctggaaagctggggtcgcacaggcagatgcagttgaggctaagatgaagggaaactgggagggtcttactgatcatgaagttgttattgttttgaggcactttccagattttgtaaaataaaaatgttagatttatgtaaaaaaaagaattccaaaaaattattgcaacaggagaaagcaataaccaactataagatctttatggcttgcaaaaatgtaggcataaaaggactttcttccctagggaggagcaaacaagtttagaaaggaggtgggagggaaatggcaaatggaggatgaaaaagtcagattttggatcagagaatgtcttaccctgaaatcagcatgttcttaggagggatgtaaaataaggttgtatgttgactcaggctgagggtagctcaaagttcaggagcctgagggagtgagataaccctaagtaaagtttgattaaaaaatattttattttaagctgggcacggtggttgacacctgtaatcccagcactttgggaggccgaggcaggcggatcacctgaggtcaggagtttgagaccagcctggccaacatggtgaaaccctgtgtctactaaaaatacaaaaatgagtcaggcatcctggtgggcacctgtaatcccagctactcgggagacttgaggcaggagaattgcttcaacctgggagaaggatgttgcagtgagccaagactgtgccactacactccagtctgagcgacagaacgagactccatctcaaaaaatatatatatatattgaccagtgaagacaaattcaattgatattcttaatgagaaaaaggagaaactgtgcagagtgtgtgtctggctgtgtgatatgtaagaaaaagtcataacaggaagagtgtttatttccataaactgttcttggagtacacaacagatggagaattttattaatcacaaatattttccaagattatctatgtgtttcatctttccccatctctttgttctacacatttcttccatttggcttttcctgggctgcctcttatatatgaaactggtaaacattattacagtgtttttctgagttctgtgagtagctttaccaaattattgaacttcagggaggttatgaaagtacccactttttaaacagtagctcagaagcataaatgggcccatggggtttgtgactggcatctgcagtaagaacaatgttgtgggactgaatcgctgtctgtgctgactttgggtagtgtcagaattcaaacgtttgacaatgagttggtgttggagaattgtttgatgttcagaaaactctacagatttggtgccagaaaaaagatatcatggaggcctggcctgtaataaaactctgggtatttgggaatgggaggctttgctctcctgtacacaggctgtcacactgcccattgtcttgtgattcctcccaaggtgacagaagactgaaaacttagaggaaagagctctgatgacagacccccttttcttgcagctaccaccacaggattcccacctactcccaaacacacacactagacgtgacatgtccacactcctcccaggactaggcaccatcctcagaaacttcaccatggcatttttgatcaaagtgtttcttgccaaaaagccacaagtgtctgcaagtctccttgcatatccccatccctgaacaatgaatctgcagcagcaacctgttttttccaccagcctagggttctggacctcctgttcataatctcatctgcctgcatgcacacagaaatgaatcagaatacagccccacctgggccactatctgtagcaaaaaattattcctttcacctacattacactctgtcccacccagggacattttttttcttttagcttttattttttgtttgaggtacacacgtgggtttgttaaacagctaaaattatgtcacaggggtttggtgtgcagattattttgtcactgaggtactaagcatagcaccaaacacgtatattttctgatcctctgagtcctcccaccctccgcccttaactaggctccagtgtcttgtttttctcctctttgtattcatgtgttcttattacttagctcttacttacaaatagtaacatgaatttggttttctgtttctgcagtagttttctttttttgttgttttttgttttgttttgtcttgagtaggagttttgctctttttgcccaggctggcgtgcaatggtatgatctcggttcaccgcaaccttcgttttctggattcaggctagtccattgcctcagcctcccaagtagctgggattacaggcgggcaacaccatgtgtggctaattttgtatttttagtagagatggggtttctccatgttgatcaggctggtctcaaactcccaacctcaggtgatccacccgccttggcctcccaaattgctgggattacaggtgtgagccacagtgcccggcctctgcattagttttctaagcataatggtctccagcttcatcaatgttattgcaaaggacatgatcattttttaaatggccacagagtattccatgatgcttatgtaccatattttgtttttactaaatcttttattttattttatttttggagacaggcttattgcccaggctagagtgctatggcatgatatttgcttacttcagtctcaacctcccaggctcaagcaattctgtagccctcatccttctaagtaactgggactacacgtgtgcgttaccacacctggccgatttttcattttgttttccgtggagacaggattttgccatgttgaccaggctggtctcaaacttctaaactcaggcaatccagctgcctcagcctcccaaagtgctgggattacaagcatgagccaccgcatctgaccataccatattttctttatcttgtctaccattgataggcatttagggcctgtccttgtctttgctattgtgaatagttctgcagtgaacatgcatgtggatgtgtcttgataatataataatttatatttctttggatatatacccaattatgaggttcctgggtcaattgataattctgtttttagttatgtgaggaatcaccacactgctttttatagttgttgaactaatttacactcccaccagcagagtataagcattcccttttctctgcaaatttgccagcatctgttactttttgacttttaaaaaatagccatcctgatgggtttgtagtgttctgaccagtgtgatgtggcatctcattgtggtttctcttttaatttctctaatgattagcgatgagcattttttttcatttgcttgttagccacatgtatgtcttcttttgaacagcatctgttcatattttttccctctttttaatgagattgtttggttttttcttgtaaacttgtttaagttcttaagaaattttgattattagacctttgtcaggcaaagtttgcaaatattttcttttattctctaggttgtctgtttactctgttgatagtttcttttgctgtgaagaagctctttagtttaaataggtcccatttgtcaatttttgcttttgtggcaattactttcggtagcttcatcatgaagtctttgccagtttctatatctagaatggtatttcccaggttatcttgcagggtttattataattttaagtttttcttttcagtctttatcttgagttgatttttttatatggtgtaatgaaggggtccagtttctgtcttctacatagtgctaggtagttattccagcatcatttattaaagagagaatttttcccacattcttcttgtcagtttcgtcaaaaatctgatgggtgtaggagggtgatattatttctgggctctctattctgttgcgttggtcttgggcactcatggattttttataacatctttctctcttctgctttttctcccataaacattctttcaagcgcatctagtgtgcaaaattcagatgttcaagagttcaaaaactctttaaaaagttccaaaaaatattttgctattccctcttttcttaagggaattagattatttgtagatgtttttctctgcttttttgaaatacaggtaaatcatattaacagctgaataaagcttttgtcagataatctgactccagattatctttctctagtacttcagatttattgctttgtttttgcttctcgaaaatttattttttttcatttttagtcctctaaagtagacacagatttgtttggataagagctaattttaagagcacacagaaacttaacacaaaaataggaataaatttagcaatacagaatgataaagactaaaagacactaagtatctttgacagaaacctgatgatccaaagcaattatgcagtatttgcaggctgaaggacttatactgcgaaagcaagaacagttcagtgtataaactaaacagtggagtctgtagttgtaccttgctttctattgattacttcagaacaattagcatagttatgtgtagtgtttgtagacaacctgcattcatatacattaaacagtactttctttcttttgagacagagtctcactgtgccacccaggctggggtgcagtggtgtgatctcatttcagtgcaaccactgcttcccaggttcaagcaattctcctgccttagcctcccaagtagctgggattacaggtgcaagccaccatgccaggctaagtttttgcatttttagtagagatggggtctcaccatgttagccagcttgatcttgaactcctgaccgcaggtgacccacccgcctcactcttccaaaatgttggaattacaggtgtgagacataaacagcattgtctacaatcgtatgaagataaagctgaaatacttactttgaatgaatcatttaaatggttattttagtatttttttatacttttgaaatataaagtgttttaactgaaatatatttgtaatttttaaaaatgctacatacattatgactagttcattaaaattattcatacttagatatcaaatatccaaagaaaattactatgaaattgttacagtaagtagatattcgtctgaaatgtttataactttattcaatagggataattataagtaaacacaatttaagtatcttttatttcactaaatttgtatgctactgttacagggcaaataaagacaggtgatatggcccctgagaaattgctagagtctgtggcacaggagggcacctgagaacaggaaaggagaaacttatatttttatcttcatggagcagctcatttttcctgaatctcttctgttttaaaggacagaaatgagtggacattttctgtctttgtttttcttccagttgatgttatgatagcaggtaaacatgtggtactgacatctttaaaggcatattctcaagatgcaggtgtaatttgtccagagaatctcaactgagaataaattccagagaaggaggagaaagaaaaaaagtggctttccttcaggtaaacatgtgtcagatgaagagctgtgtcaacttttcctcttggactgccatgcgtttaatactcacaaacctttacttctctacttgtgtttttcctccctaatgagtttggtttaactacttctttaaattcttatgatagtcaagggtttctgaaaaatatttctttcctatattccagagccttctctacattctcttcatcatagcttcttatatgccatgcagaattctcagcaagaatttatgatccacaatgtaggatacgtaaatttatcttcaaaggttttagcttgttaactttaaaatccaaaaggtgaagatcattaagtacaatgagttctgaggtcctcttcaaagaatcaatatgtcagtatgttctgctttcctgttgtttattctccattttaaagtttaacttcctcaatctttatgttccttgctcctagtttagtaaacaacccccttctaactcacatatttagagtttttagtcatccctcatcacctgctgtatcctgagtcaccccagtcacctgccttgtaactctcctttctgccaaaactactcaccatgccactctggcttgtacccttggtccctttaaaatagcctatcaaaattagcttaaactgtgtggtccaaccctacccaataggggaaacacacagaagtagggactagccgccttagggataagacccccttctcctcccttgtccaaaagtactctcaccattgttccatccacgagatgctgccttctatagaagtaaatttgccttgctgagacgttctctgtttgagtgcttgttttctgtttgactctgagcaattgtttccaacatgcaatatcaaaaatgttccctttgtggctgttgaacatggaaagaagtagatactcaagattcctattaggaaaaactgtggtccttagtaaagatggagaacatgtaatgttgaggctccatctgtgtgttccattagctctgtgcagaacaggattaagaaaatgcttatttaaatgagatggaatttattacccagaaagatctgaaaaaacttattaagagatacctgctctctagggtgctaaatgaagcctacttaaaattgctactaaaaattacagaacataggagtaatctgtactttgaagttgacataacacatgtttcttcatggttaaattcagattttatttacttttttgggaggaatatttcaacagtgatgctgtgttcttgtgcgtgtggtcttccttggtgagtataacttgaatacataattcataatataccctaaaggttttatttctctttttttctagaatattttttactaatttattctttgcatagaagagttttggatgcctttctccagaaaatgttcagaatttgttcatttagaaaacaatttcttcaagaatttttatcttaatccaaacttttgacattcctaagatgagttgtattcttaaccctgaattagtggtaattccagcagtttagtggcataaaatactgatacccccacctgaaaatctcattgccatcaccaatttttgattcagtagtaccaggtagtaaaatttaaaaacctacaaggagggtcaggtgcggtggctcattcctgtaatcccagcactttgggaggtttaggcatgtggattgcctaaggtcaggagttcgagactagcttgaccaacatggagaaactctgtctctactaaaaatacaaaattagccgggcatgatggtgcatgtccataattccagctactctggagggtgaggcagtagaatctcttgaacccaggaggcagaggttgcagtgagctgagatcacgccattaaactcctgcctgggcaacaagagtgaaattccatctcaaaaaaaaaacaaaaaacaaaaagaaacctacaagttgaaagtattttctatatatttagaagtttctgttataacttagtattttggtaataatttactagtgttgcaggaagtcagggaccccgaatggagggactggctgaagccatggcagaagaacataaattgtgaagatttcatggacattttttagttccccaaattaatacttttataatttcttatgcctgtctttactgcaatctctgaacataaattgtgaagatttcacggacacttatcacttccccagtcaatacccttgtgatttcctatgcctgtctttaatctcttaatcccatcatcttcataaactgaggaggatgtatgtcacctcaggaccctgtgttgattgcgttaactgcacaaattgtttgtggagcatgtgtgtttgaacaatatgaaatctgggcactttggaaaaaagaacaggataacagcaatgttcagggaacaagagagataaccttaaactctgaccgccagtgagccgggtggaacagagccatatttctcttctttcaaaagcaaatgggggaaatatcactgaattatttttctcagcaaggaacatccctgagaaagagaatgcatccctgagggtaggcctctaaaatggccatttcagggggcggccatcttttatggtcaagctgtagggatgaaataagctccagtctcccatagcgctcccaggcttattaggatgaggaaattcccaccaaataaatttttggtcagaccagttgtctgctctcaaaccctgtctcctgataagctgttatcaatgacaatgcatgcccaaaacttcattagcaattttaatttcaccctggtcctgtggtcctgtgatctcaccgtgcctccatttgccttgtgatatcttattaccttgtgaagcatgtgatctctgtgacccacaccctatttgtacactccctccccttttgaaaatcactaataaaaacttgctggttttatggctcaggggcctcccggaacctgctgacatgtgatgtctcccccagacaccaagctttaaaatttctctctttgtactctgtccctttatttctcagactggccaacacttagggaaaatagaaaagaacctacatgaaatattgggagtgaatttcacccaacatctggctgaatttcccctgataactggaatatatatgcatatatatatatatatatatatatattttttttttttttttttttttttttttttttttgagatggagtctcgctctgttgctcaggctggagtgccgtggtgcaatcttggctcactgcaagctctgcctcccgggttcacgccattctcctgcctcagcctcccaagtagctgggactacaggcacccgccaccatgcctggctaattttttgtatttttagtagagacggggtttcactgtgttagccaggatggtctcaatctcctgaccttgtgattcacccacttcggcctcccaaagtgctgggattacagtcgtgagcccctgcgcctagcctaatttactagaatattttatcacatcctctctgctgaacacattactagcttgtaattggagaatatgagcaagattcatgttatttatttttaataaaacatgtattggtgtctctgaaccagacctgatcacctgtctggagcaggaaaaaaaacctttgactatgaagagacatgagataattgccaaacccccaggtaggtgtgagtgaaaatgaatacaacagatgacacagattagagatcccaaggtcaaagagaaagccagtccttagaatgtgatttgggaagctgtgttccaaaggaaatagttcctgggcatctgttctattgtttgtttgtttgttttttaaattttattctcacaaaggggtatcttctgtcttgtgcttttaaattctctacaaattccacttttctttccgtgagcttccttcaagttcacagtgagagccaaagtccacttcagggcatataagagactgcacaatctggctgcttttctattgttttggggacacacaactatctgcatgattttgagaaactaaaagtttttaaagtttttttttgcatcagatttgaaatgtgtgggagtagttgtttctgttgaatatttttgttcatttttctgcccagcccattctgtttttattactatatagccttgaaatatagtttgaaattataagtatgatatttttctgctttgttcttttttctcaagattgctttggctattcaaagtttattttagtttcatgtaaattttagaattgtattttccgttactgtgaaaaaaataccactgcaattttgataggaaatttattgaatctatagatcactttggataatatggcactttaataatatttattctttcaatctgtagacacaaaatattttaaaatttatttagatcttctctaattttttcattgtttttttttattgtgaagatttttacctccttggttaattttttctcacaaatttattatttaatgctatagtaaataagatttgtttcatcttctattttatctggtagttgaagtttctgaaaccatatatatacttgcatgttaattttatattttgctaatttacgagtgtatttattagtttatgtagcttttaatgttctgtgatggtttttctaaaatataagattgtatgatctacaaacagcaactttttacttatttttctttcatttcaatggatttttttgtttctttgagtaattcttctgccacatacttccagttctacattaaaatagaagtattgacaatggacacaatatagttttgtattggtgtctgaatttgatggagcaaacacctcttcaagttttcatgaactgattttagaaggtaaggatctttctttgggcccttggggttatgagatgccctctgaatttgtagtgaagaggggttgtagcttggtcacaaggccgctgggtctgcactagggtccacctttagttggcttgttacaggggcttgggtagtcataattctcattttgttttggacacgctgcaaatttttcaggactttgctccatggggcagacactagggcatgtttttgcagttgggtctgcatatggtgggccttatatcaggacatggatgagtatggctttcactgagtaccagagagcatttcctcatgtaactgtttgggtttctatgtaggcaaaactggccatgaactgtggctcaggtactgaaactgagccattgaacgacttcagggaccacagcaaaggccaaggtctacaagtctgcctgcatggctgtaaatgggtatcttccttcaggtctctggaatggcaggacctctcccagactgtggctgggaggagtttgggatggttacagagttaagttcagaattctcagtgggatcaagttgggtgaaccctatcctggtctgtagccaaaaacaggggtcctgtagtttcccacctgaatgacatcctgccttcttaatagaacacttctcaatcttaagctttagtagtgtttcacaactccctcctgggatctcaaatctctcttcgagacacttattttggagatggcatcttgctgcttaacccaggctggtcttgaaatcctggcctgaagcagttctccaaccttaatgtaccatgtagctgtcattacaggtgtgagccataatgcctggtttctcataaaggcatttttgtcagggatggctgacttttttttttgctgtgaggggatatgaaaatagggcacttttaatctttttatcttactgatgtcactctccctacacatttttactttctattttctctttcagatttgcctgtaattttagattcagatatttaggacaatatgctagaatttgatggtattcctgaagtaaattagataattagtaagcactccatatttactcagttatttgtaaatttaagtttgccacaggcaaaaaggaattatagtattttcatctactttcttcagcttacatctacataataaaatagtttatttcctaatatttgtttcacatatcagagggtctcactttattctgcaaaatatatatgtgtatattttctatatttaacaatgtaaggctgttttttgcttctaaagttagattacagcagtttcattttgtgtaagaatagcatatatttaaaacataaaaaataacgttggtttattttaaatgcttatttattaaaagtttctcatcgtgttacccagactggtctcaggattttggccccaatggatcctcttatcttgatctcccaaagtgttaggattataggcaacagccactgcactcagtcagtatttttaaatttaataaaatttggtgtgtgtcctaacagcatacaccagatgcagataagaatattgtacattatcctggttttgactggaaagttttgtatgtgtctgtgaagcctagttggtctattacatggtttggatgttcatgttatccaaagctcatgctgcaatataaatcctcaatgttggatgaaggacgtggtgggacatgtttttgtatgggggcatatttctcatgaatggcttggtacatcctcttggtaaccaaaaagtttacactctattaattcaaatgagagctggttcattacatgaacctggctccttcacctcacacttgctcagtctcttatcatataatatgtccagttactgtttacattccaccatgacggtaagtttcctgagacccacaccaaaagcagatgctggcacacacttcttatacagtctgccaaactgtgagccaaataaactttttttctttgtaaattatgcactctcaagaatttctgtatatgcaaaataattagtacagtctataatgttgcccaggttttctgtttcttattttttatttgaattttctatttattattgcaaatggagtcttgatgtctacaattattatgttactatgtatgtcttgcttcacttttgtcaatatttgctttatttattttggagctctgatgttatatacacacattcatatagataaataaatattatagttaaagattcctggtaaatcagctcactttaccataatatattatcaatttttgtctcatggtagtacttgacttaaagcataatatgtctaatataattatgatcacttcactcacttgtggttactattttcatggaatatacatctttttcattcggttactttcagcctatttgactgaatgctaaaatgagtctcttgtaggcagcatactgtatgctttttagaaaaaccactcacactgggcatggtggttcacacctataatcccagcactttgggaggccaaggtgggtgggtcaactgaggtcagtagtttgagaccagcctgtccaacatggagaaaccccatgtctactacaaatacaaaaattagccaggtgtggtggcatgcacctgtgatcctagctactcaggaggcagaggtgggagaattgcttgaacccaggaggcagaggttgcagttagccaagatcgcaccattgcactccagcctgggcaacaagagcaaaattcagtctcaagaaaaaaaaaaaaaccactcaggcatcctatatcattttctttatattatttatttatttatttattttaagatggagtttctctcttgttgcccaggctggagtgcaatggtgcaatctcagctcactgcaatctccacctcccgggttcaagttattctcctgcctcagcctcccaagtagctgaaattacaggcacccacaaccacacccagctaatttttgtagtttttgttggggtgatcagatccaacaccaggttgtgggggctacgaagtctggcagagtcaaaggaatgggacaagacaagttaagagtacatagggtgggtccaggaggccaaagccagtttggaggctgtgaaggccctgagttctgggagtccacactatttattggtaatcaaacaatgaagcaggtgctgaggacgtgtggatatgagggtagacaggtgaggacgtgaggatagaaaggtagtggtgcatcaagtgtagctgtgacagtttagcatatgctgtgctacttaagataagggagaacaggttcttctaattcaagatccaatcatttatgatcttccgagagcaaggagcaaggggccagcgagtctggacacattccagaggttacaaggggttttatgccctgagccctgggttctctccaagccacaaggagttttatgctctgggcttagactgtagtgtggcagggcaggcttccaccatttggcacagagcttggttttccaaaggtcatgaggggttttagaccctggacccaggacatgttccaagactcttttacattatgtcagacaagcaagccctgcctcagctcttctgccaacagttttagtagagacggggttttaccatgatggctaggcttgtcttgaactcccgacttcaggtaatctgcccaccttggcctcccaaagtgctgggattacaggtgtgagccactgtgcccggcctcatttatttttgagatatgatctcagtctgtcaaccaggctgatttgcgtggttcactgctgcctgaacctcccaaactcagatgatcttctcattttagcctctcaagtagctgggttacaagtatgtgccatcacacacaggtagcttttttgtatttttagtagagactgagttttcccatgttgcccaggctggtcttgaactcctgggatcaagtgatcagcctaccttggtcttctaaagtcctaagattacattttattttattaagtagtttaattaatttatatttaaaatgattgcttaaagaaatgaagttgttattaccagttatatttatggttttatgtgtttccagtagttatatttttctcatttcctattttactttcttaatttttatttaattttgtactcacatgctttattttttattgtcttttgcatactttctataaatattttctttctaatcatctgaaaactggagattgcatgcatcttaaagttaaaacaatatgttttaatttcataaaaacttcaactgaatacaaaaactatgcctctatattttccagtttgttattgatatataaattattttatatggtgtatctattaacagatgcacgcagatttacacattgtttttatattctataaaagcactttaaaggttttatttaccatcatttttgttttttttggttgtttgttttgatttgtttttgagactgagtctcactctactgcccaggatggagtgcaatggtgcaatcttggctcactgcaacctctgcctcccaggttcaagggattctcctgcctcagcctcccaagtagctgaggttacaggtgcctgccatcaggccagcctggctaattttttgtatttgtagtatagatggggtttcaccatgttggccaggctggtcttgaactcctgacctcaggtgattagcccacctcagcctcttaaagtgctgaaattacagatgtgagccaccattcccagtgtggctgggatttaccatcattttgatagtaaagaattctatatgtgtccatatatttacatttattggagagctttatatttacatatgtttttatgatgctgtccagcaccattttatgtttctacataacggacacattttaacatttctctgtttttatatgtagggtctcattatgttgctcaggctggtcttgaacttctggtctcaagtgatgtgattgctttggcctcccaaagctgtagaattacaggcatgaagcactgtgcctgagccccgtgcagtattttttttttacttttttttttttgagaccgagtctccctctgtcacccaggcctggggtgcagtggcatgatcttggctcactgcaacctccgcctcccaggtgcaagcaaatctcctgcctcagattccatcccgagtagctggggttacaggtgcatgccaccatgctgggctaatttttattattattattatttttagtagacatggggtttcaacatgttggccaggcttatctcgaacttctgacctttgatgatccaactgccttggcctcccaaagtgctgggattacaggcttgagccatctcacctggcactttttttttttttttttgagatggagtcttgctctgtcgcccaggctggagtgcaatggcatgattttggctcactgcaacttccgcctcttgggttcaagtgattctcctgcctcagcctcctgagtagctgggactacaggtgtgcaccaccacgcccagctaatttttgcatgtttagtagggacgcagtttcaccgtattgttcaggctggtcttgaactcccgatctcaggcaattcacccacctcggcctctgaaactgctgggattacaggcgtgagccagtgtgcccagccccatgtagtatattttgtagaactgttagtggtgatgaacagtctcaccttttattttggaaagtctttatttttgtcttcttattgaagtagtgtaattttgaattgagttttactggttagaaatttttttttgttacattaaaatttgggaagttctcagcttttttttttttttaatcttcaagtaatgtctgtattactttttctctatattctaagattcctttcatgaatacattgatctgcttgatggtatccaataagttttacattccatgtgttaattttgttttgtgattttatattattgtgttatatatttttgggtatgccacatcacagcagttagttgtgttttgattttttagtttatattataattgtatatgacaatatttaactctgtacaatttaagacagtgtggagcaaaattaaatgtgaataagctgtatgtctattaccagtataattatttctatgtttgttggcctgtataaattttatcctggtatttttgtgtcacttgtatatttgttgtgtgtttcttgtagtaggttttttggagttttttgttgttgtttgtttgtttgagagagagttttgctcttgttgcccaggctggaatataatggtgggatcttagctcactgcaacctctgcctcctgggttctagcaattctcctgcctcagcttcccaagtagctgggattacaggcatgcaccaccatgccaggctaattttgtatttttagtagagatggggcttaaacattggtcaggctggtctcgaacacccgacctcaggtgatccacccacctcagcctccctaagtgctgggattacaggcatgagctactgcaccaagcctataacagttttttaatcctgtctagatgagtagtcataaaaaatctcctaatttcaacatctatttatttgtgaatctacattgttttgtgtgaaagaaacacttttggatttgaagataatttaaaaactataataactctgtatctctcttaggtattatttttacttatgtattttgtgtcaaaaacataacaaaatttacaataaaatatttctaggccgggtgcagtggctcactgagtgatattccagtatttttgtacctactgaatgatttggtgacagaaatttgcattgcttttacctattggctttcagtcacaatgctgcaatagttatgtgaaagttaatatatgtactgcattctgttttatttttctaatttttcacctttatactcataccaattgttttaattctgtagctttttgatgtgttttgaaatcagaaatggtaaagcctccaacgttgttcctttttttgaagattgttgggtactttcttgtctctttagattccatatacttttggatttgttgtttttatttcttcaaaaatgcaatgagacatttgaaaaacattgagttaaatctgtagattaaattgagcagtacagacatcttcacagtattaattctttcttttttggttgtttgtttttgagatggagttaaattcacccacctcggcctcccaaagtgctgggattacaggcatgagccaccgcacccagcccagtaatttcaacaagtgcatgctcaagagtgtgtcatatgatttctatatatttgtaaatttatcaaatatttatattattgttttatattctaatttcattttttgtcatagaaagtaatctataaaatctacattttagaaaatgtgttgaggctgggcgcggtggctcatacctgtactccctgcacttgggaggccaacgcaggcagatcacctgaggtaaggagttcaagaccagcctgaccaacatggagaaaccgtgcctctactaaaaatacaaaattagctgggcgtggtggtgcatgcctgtaatcccagctactcaggagcctcaggcaggagaatcacttgaacctgggaggcagaggttgcagtgagctgagactgcaccattgcactccatactgggtaacaagagtgaaacactccatctcaaatatatatatatatgtgttaagattttgtttttggactaacaggtggtctatataggagaatgttgtttgagctattgagaaggctgtgtattttgatgctgttgaggagtgttctctataccttcattagaaataagtgttttttactgccttctagtcctctgttccattattaatattatgtcttgttttattattattacagaaagtggggtattgaaatatcctactataattatattgctctctctgtgtttatccaattttgttagtgtttgctttatatatttgaaaccctagtttgagacacacacacacaaatacacacatggataaataaatttgtcataggttctcagtgaatgaatctatatattatttaatgtcctttgtctttctgaagtttgaacttaaagtacattctataaaatatgacagtttttgacttaacatgtatcttgtataatattattttgacctcttctactctcatttggttaatatttacgtgacatttctacttccattatttcactttcagtcttttttgtcattagatttcaactgagtcctgtagaaaggcaagttgaacattgattttaaacactttttaataaacctgtttattgaaagtatgtctcttgattggaaagataattatatatatatttaaatggttttctgaaagagaaaaacttactaatgttatattattaatcattttatttgattctatctttttctctcattttctctttctgtctttttttgtgtttttttatttctgtattgatatgctttcagtttttttcttactttcttttgtgtatctatataaatattttcttagataccttgggggattacataaaacctctgaaagatccaacaatatatttgaatatggtaaaaaactaacttcaattgcatacaaaaattcttcatcattacgtctgccttcaactttgttattgattttgctaattttatttttttatgttttatgttcattaacagatgtttataatcatgtctatacttttaccttttaaattttagagaataattaaaaatgttttctgtatcattatgataatgttaagtaataaatttcatttttgtgtatgtgcatattgcattatgttattttcagtgaaagaacctcctttcagcatctttgatatgtagagcatatgcaatgtcaatatactttctcaggatttggttattttggaaggacgtctttgtatttggtagtacaattttgctgatggtattattcccacttgacagctttttaaaaattattataactttaacaatatcacacagtttccttctgacttgcaaatttttttttgataaattcactggttatctcatgagactatgcttataaatgaaacatttttatattgtagtgcccaaaattcttttctcatatgccattttgaaattttgcttatatttgtgtctgttattatctttgtgtgtacctaaatttgttttttcagctttttcatgtttacgtcatattttcttttaagaaatttttcagttttttggtaattttatatccacaatttttggtattttaatttttttatctttatttttctgatcttcggtagttgtctgtgtttctatttttttctgatacggagtctttttctgtcgctgaggctggagtgcagtggcgtgatgtcggctaactgcaaactctgcctcccaggttcaagcgattctcctgcctcagcctcccgagtagctgggattacagctgcctgccatcacgcccaacgaattttttgtatttttagtagagacggggtttctccatgttggccaggctgatcttgaactcctgacctcaaatgatccacccactttggcctcctgaagtgctgggattacaggcacgagccacaaagcccagcctttttcattgtatttttgagacagtgttgctcaggctgcagtacagtggtacaatctccactcactgcaacattcccctcccaggttcaagcagttctcctgtgtcagcctcccaagtagctgtgattacaggcaaatgccaccatgcccagctaatctttgtatttttagtagatacagggtttcatcatgttggccagggtggtgtcaaactcctgacttcatgtgattttcccaccttgatctcccagtgtgttgggattccagaaatgagccactaaccctggcctgttcaatctattttgaatttttaaaattactttctatactttctatggttgctttagaaaattttatgtttttgatggggccatattgttctaatatttggtatacattataatctttgattgagatttggacattaacaaaaagctacctgttacaatctttataatatagctttgtgtttgcgtagtctgaagtcaattgtcttggctaaagattctgggaattcctcaaacatgtttttaggatgtatcttgtctaaaattttgtttttattgtttagataaatcagcttgttcacatttcttcttaataatctgtaatcacttgccacacccattccctgtttggggtactgcagtttctctgcttctctgtaatataccttcagactcagcagactcaaactgtcattccaacatgtatcaccatttctttcagcattttatgtcacgagaaacattaactaatgtctaagaaagcccctagaagccagaaataaagatatatgtgccaatatttttctagtttttttttgttttgtttttaaaaacgaggggttggcaatttacatgtgtgtgtatgtgtgagacagagtctcactctgttacctaggctggagtgcagtggcatgatcttggctcactacaatctctgccaccacagttcaagcaattctcctgcctcagcctcccaagtagctaggattacacatatctgttaccaagcctggctaattttttgtatttttagtagagatgggatttcaccatgttagtcaggctggtctcaacctcctgatctcagataatcctcccgccttgccctcccaaagttctgagattacaggcttgagccatcatgcctggtcagcaatttactttttttttggaggggcaggggatgaagtctctctcttttgcccaggctgaagtgcagtggcacgatctctgctcactgcaacctccgccttccaggttcaagcaattctcatgcctcagcttcccgagtagctgtgattgcaggcacccaccaccatgcctggctaattttttgtatttttagtagagatggggtttcaccatctcagccgggctggtcttgaactcctgacctcaagtcatccacccacatcagcctcccaaagtgctgggattacaggtataagccaccacatccatttggcaatttacttttgaagacacaatcttatatggagagcaggaagagctgtgttgggtataagtaacagacctctttttcttctatgtggctctttgcattgtgctcacttggggcccttcacacacttaactcatttatacattttttacaaacgttttttggtcagtatgtttttgttacatttatatgtccaggaagaaattacagcttatggtattttgctatgtcatcttgcttatgtagtttgtataattttataggttagatttgtaaagtatatttatctgagtctagcaactgaagtaatgtatttgtattgtttctttcagttatgtgttctcattttgcccaagacctttggccagagcagagcgtaaaagattctttccaaaaactgatactgagaagttagttatgaaaaatgtggacatgacaatttacagttaaaaaaagaatgtgaaagtgtggatgagtgtaaggtgcacaaagaaggttataatggacttaaccaatgcttcacaaataccaagaaaaaaatatttcaatgtgataaatataggaaagtttttcataaattttcaaattcaaactgacataagagaagacatacgggaaaaaagacctttcaaatgtatagaatgtggcaaagcttttaacaagttttcaacccttactacacataagaaaattcatactagagagaaaccctacaaatgtgaagaatgtggcaaagccttcaactggtcctcataccttactatacataagagaattcatactggagagaaactctacaaatgtgaagaatgtggcaaagccttcaactggtcctcataccttactgcatataagataactcatactagagagaaaccctacaaatgtgaagaatgtggcaaagcctttaagtactcctcgaacctcactacacataagataattcatactggagagcatctctacaagtgtgaagaatgtggcaaagcgtttaaccatgctgcatgcttctttgtcattttgaagatttgacttaaagtacattttataaaatatgacagtttttgacttaagatgtagcttgtgtaatattattctgagctcttctgctctcatttggttaatatttacatgaaatttctacttccatctttccactttcagtctttttttctcattagatctcaactaactcttgtagaaaggcaagttgaatcttgatttaaaaattttttaataaacctttatattgaaagtatgtctgttgattggaaagataattatatatatattaaaatggttttttgagagagaaaaacttactaatgttattttattaattgtgttatttgatttttgtatctttgtctctcattttctctttcttttttgtgtttttttatttttatttttatattgacatgctgtagggagaccccctgaaactatggctatggaatgaaagatgaaatgctcctgatagttgtaaatacaaaattacatgcaggattgtgtaaagacaatgccaggttgggctgccagaatgagccaacagtgcgtgatgtgcttcgccctgcagagagcctataaacggatgtgcagtcaggaaggtttcacatcaccaagattcctatcccagaaaagcagatattcatagctctgggaatggaatgcgacccttgtggagagcctacaaatggatgcatgaggggtgcctgttcatatggataacatcgggctataaacgcccttatcttgccatggctcttctaggtctctttagggttaagacatactcccttctgagaatttgtggtctaatcggttgtctagttttacatcctccttttattgattgtttgcaaccagcttttgctgtaattattactactgattaatatcttgctcatcattaatcatagattatggagagacggggtttccgttttaaggctctgttaaaaattgctgatgcacacactatattgtaaattcttatctctgtatactgtacttctgcatattgatgttatgttaaagaattacttcattcccatgtgaccatctcacctcataatcaaacgactctaaatccctcattaacctacccccaccctcactaaacttaataataaatgctggtatatccagtgcattggcagcatggcaggaccagaaggcggtgaccctcctggactcaactttcactatcttgtgtgtgtcttttatttcttgacctgccgatccacctgggaacaaagaaagagccccattgcattgcgggctgctggccagatcccgcaataacatgctttctgtttttgtcttatttcttttttatgtatctatacagatattttctaagtggtactttcaaggattacataaaacctctaaaagatccaacaatatatttgtttgtgataaagaatcagcttcagttgcatacaaaaattcttcatcattacatcagccttcaactttgttatgattttgctaattatattttttatgttgtatattcattaacagatgtttatagtaattcctatacttttatcttttaaattttagaaaataactaacaatgttttctgcaccattatgataatgttaagtaagaacttttatttttgtgtatgtacatattttttccagaaatttatgtattttcatatgattaagtgttgttttcttgcattatattattttcagtggaagaaactcctttcagcatctttgatatgtaggacatatgcagtgccaatatactttctcaggatttggttactttggaaggacttctttttatttgagagtacaattttcctgatattctcattcccacttgacagtttttttttaattataactttaacaatatcacatagcttccttctgacctgcaaattttttaataaattcactgattatctcatgaaaccatgcttataaataacacatcatttttatcttgcacctcccaaaattctcttcttcttatctgtgatttttgaaattttatttatatgtgtatttgttatgaatatctttggtgtatcctagtttgtttagcttcttcatctttatatcatgttttaagaaattttcagttatttttttgtattatttatattcacgattttttttgctttttttttttttttttgatgcagagttttgctcctgttgcccaggctggaatgcaatggcatgatctcggctcactgcaacctccgcctcctgggttcaagcaattcccctgcctcagcttcccgagtagctgggattacaggtgcccaccaccacatccagctggtttttgtatttttagtagagacagggtttcaccacattggccaggctgatcttgaactccagacctcaggtaatccacctgccttgggctcccaaagtgctgggattacaggcgtgagccaccgtgcctggccttttttttcctttttaatatttcttgttgttatcctcatttttctaatcttcagaagttgtctgtgttcctatttcacttactgaatattattcaatatatttgatttgatttgatttgatttgatttgatttatttattattctttttgttttctgagacggagtctctttctgttgcccaggctggagtgcagtggcacaattttggctcactgcaacctccgcctcctgggttcaagcaactctctccctcagtctctcgagtagctgggactacaagcacccaataccatgaccggctaattttttgtatttttagcagagatggggtttcactatcttggctggtcttgaactcctgacctcatgatccaccgatgtcagcctatcaaagagctgggattactggcatgagccaccaagtccagccagctttttacttttaaaagcacaatgttatactggagagcaggaggacctgtgttgggtataagtaacagactttactttttcttctatgtggctgtttgcattgtgctcacctggggccgttcatacacgtaacttatttataaatttgttacaaatgtattttggtcagtatgtttttgttaaatttatatgtccaggaagaaattacagcttgtggtattttcctatgtcatcttgcttatgtagtttgtataattttataggttagatttgtaaagtatatttatctgagtctagcaattgaagtaatgtgtttttattgtttcttttggttatgtggtctcattttgcccaagacctttggccagagcagagaataaaagaatctttccaaaaagtgatactgagaagatatgaaaaaaatggacatgacaatttacagtaaaaaaaaaggctgtgaaaatatggatgagtgtgaggtgcacaaaagaggttgtaacggacttaaccaatgtttcacaaatacccagagcaaaatatttcaatgtgataaatatatgaaagtctttcataaattttcaaattcaaacagacataaaagaagacatactggaaaaaacctttcaaatgtatagaatgtggcaaagcttttaaccagtcctcaacccttactacatataagaaaatttatactagagagaaacctacaaatgtgaagaatgtggcaaagcgttcaactggtcctcacaccttactacacataagataattcatactggagagaaactctgcaaatgtgaagaatgtgccaaaacctttaagcagtcctctaaccttactacacataagataattcatactaaggggaaaccctacaaatgtgaagaatgttgcaaagcctacaattggtcctcaccccttactacacctaagataatttatactaaggagcaaccctacaaatatgaagaatgtgacaaagtctttaagaactcctctcaacttaccacacataagataattcataaaggagagaaaccctacaaatgtgaagaatgtggcaaagcctttatgtactcctctacccttactacagataagatacttcatactggagagaaaccctacagatgtagagaatgtggcaaagcttttaaccatcccacaacacttttttcacataggaaaattcacactggagagaaatcacacaagtgtgataaatgtggcaaagcctttatttaatcaccaacccttagtaaacatgagataattcatacaggagagaaaccctacaaatgtgaagaatgtggcaaagccttcagctggtcctcacaccttactacacataagagaatttctactgcagagaaaccgtacaaatgtgaagaatgtggcaaagctttcagctggtcctcacaccttactacacataagagaatttctactgcagagaaaccgtacaaatgtgaagaatgtggcaaagcttttaactgatcctcagacattaataaacatatgataattcatattggacagaaaccaagaatgtgacaaagctttttaaggaagttctcaaccctcattacacataatttatactggacagaaacctacaagtgtgaaaaatgtggcaaagcctataacaagttctcatttttatttttttttgagacagagtttcagtcttgtcacccaggctggagtgcaatggcacaatctcggctcactgcaacctccgcctcctgggttcaagccattctcctgcctcagcctcccaagtaagtgggattacaggtgcccaccaccacacccagctaatttttgtatttttagtagagatggagtttcaccatatttcccaagctggtctcaaactcctgacctcaggtgatccacccgcctaagcctcctaaagtgctgggactgcaggcatgagccaccatgcccagccacaagttctcaattcttaagagacatggtgataattcatgctgaagaggagctctacaaacctgaaagatgtgaaagtgcttttagcaacccctccaacttttctatacataaaaaaaattatactggtatgaaactctagaaatacataaaatgtgaaaaagcctttatatggttgccacgcttgattgtacataagataattcatactgccaaaactcctacaagtgtgaagaatgtggcaaaacttttcatcagtgcttacaccttatttcatagtaaagctagtatctttgagaaaaatcgtacaaatataaagaatatggaaaaaccattaatgcctactcacatcttactcaacataagaagattcataattaataaaagcattaaaagtacaattactgtcaaaaaatctttcagaaaatataaacctttaaagtgaaaaaaaatttattctgaagacaaccattacaaatataaaggaggttgtggtacctttacttgtatcacagatcttattgcaatcattttgtactagaggataatccctaagcagttgctcaagctttgttcaacatcagggattttatattggagaaaagtcctgcaaatgtaatgaatttggagagacatttttttttttacaaaaactacagcttgtaaaacaccagagagtttatactaaagtatatttttgccgttgcagtaaataagaaaaaatgcttaattcaaaattgattctatgtaaatatcagagaatttacactagaataactaaggcactgacacttcagacattacacttagagtgttgagtataaaaactaatccacgactaaagttgttagataaattatttgtatgtaactataaaaggagtagattttttgaagcattgtaattacattgaaagtatacttgtttccttgaaaaaaattttttgaaaagtgaataatgatgtaatacagctttcaaattactttgtgctgttattttattcctatcgtattcacgtgtgaaagcatgtgatcaattgttgctgcatcgagatattagagattcttttttattaattgggcatatttatgaccttttctataaaagagtaaggacattaaaatgaaagatgcctgatgaaaatataagtggagaggttctttgtagttaacctatattaagtaatgcatatggtagatgttcagagtaatacttttctatattatagtgagagaaattattaattatagttaaaagtatattaaaataaattagtaattttactggttgtacttttatgtaataaaatgcagtacatttaaaaattgttagattatgtgtgaacttattttttttaccatgttaagactactgtgcattgaatgaagcattattatgcaactaaatttagcctatcccacattacttaagggtgtaggtaaaagatggtagcaatatactatttggtgcatagtggaataacatctctagtaatcactttgccagtggctttaaactgcaaatgagttgaagaatactgttcttataggttaaatttttactcttttttcttactgaaatttattattagtatttgtgtgtatacagtatgtgtatatatttatgccttatatggcatatttgtattcaagcatacaatacgtagtaattacactagggtaaatagagcatccatcatctctagcatttattctttctattacaaacagtgtaattatacactttattatttattgtaaaatgtacaattaaattcttatggactacagggttatttttatggttataataaaaattatacagaaatataaatagaatacagccaggagcaggggttcatgcctgtaatcccagaacattaagaggccaagacaggtggattgcctaaggtcaggatttcaagaccaggctggccatcatggtgaaaacccatctctattaaaaatataaaaatataaaaattagcagcgcatgcctggaggttgaggcaggagaatcgcttgaacccaggagatggaggttgcaatgagctgagattgcaccactgcactccagcctcagtgacagaagagactccatctcaaaaaataaataaataaaataaacagaaatagaaataaaattcatacatttctgagtcctgaaaaattattaataaatatttgttatatagttttctttgaacatgtggtctctctgcatgcaatcatatagacttttaatttacatagagttaagtatacacatattactctgaagataaaccttagatgtaagaaaattataaagtgagtgtgtttgtgtatgagtttgtacatatttttagaagaaaagtgcaattattggaacaaaacaaattaattaggtgactaatagaaaactaaacaccatgaaaatgctgaaagcaaatctatactttctgctttgtcttgaatttattaatgtaaaattttatgacttatggttcggattctccccagaatctgcctattaaagcacaggcaactttctctccagagataacactcttgagtacaacaataaaagccctcttcaaacagaaaacaattatttctaacatttattttaatgtaaatttcactaaaattgactaagtggatagatttttattgttctatgtgtgtgtgaatgtataaaatagtacataaaggaaaaataagccagaaagaagatgttagttaatatttgtgatgaataaaactggaaaggagttaattattatttgcagatgacagctttgtttatgtagataacaaaaacagcagaaagaatattttaaaagcttattcagttgggtaggcaacattctaagataataccctggattcccagtctgttgcacacctgctgtgtaatactttcctcttgagtgtaaaaagatgtgtgactgtggtgggaaattactcatgaaattaggttactcatgtgttgactttgtgttatcaaaatggagattatcctgattgtgctaatcttaatcataggtgcttttaagggaaagagacacatcacagaaaatcacccctgctggctttaaagtcagtgacttctaggtgggccatgttgtaagctgcttatggtggtcacatggcaggaaacatgtttgtatattgtcatcattcctgcctcctggatgttgcttccagtagggagaataagaggatcctatggcagagggggaagaaaagggaaattcattcatgcaagaaataatcacctctcatctgggatagcttaagagaaagaggagaccacaacaggaccaaattaatgggaggaaaaaggtaacctgggtaaaagtgctctctggcattatggaactacatttagtaagctgtagtgaatgatcagcctctgggataccaatagtctaccaacaaggctgaactcattctaattcaatcagcatgtctgcaccattctggtgacccaggtttacagtattcattacagaaataccatgaagaccagtgggtaatgtcctagaattgaacttatttcaaaaagcattcctaattatttgttttcacttttgaaaaaccttaaaaacaatacatttataaataattaacttctaattatagaggattctactatactgtaatataatattaaactgtaaacaccttaacatgaatattgaatgcatgattagttatgtagatggtttgttttagattaacatgacaaaagtaacaattagagaaaacatttgacatgggataaaattaatcaaaaccacatcttttcaatggcttggcataatttccatgcttttggaaatggccagataattagcaagaaacaaagacaagattttggctttgctcaatgatggtttttgaccttttgaaatctaaaatccttgctaaagtattcaaagggagtattttattggtggctgcccagggtttccaaggcaatgaaggaagaattttgataggcaggaaaatgcacactatatacacacattgctcttctctgatttgctttaacactgaaaaattgaagttgtaaatgtagtctcaatttagagtaaattaacaaatgacttgtttttcaaaaaagccaatgtataaaattaatgggtaacagaagccattagctgctaaaaactagtatgactaaattcagtaagtatctagccatgcaaataacagtccaattaaatgaagaccctcataggtgcatatggaaagcattgctgtgcagtgtggtgcctccactcagcattttcttctgcctcttcacagagaaaccagtttcccctgagtgactcagggtgcatactgggaactgagaatgctgtgttcagagtgattactgaaaacatggttaacacacttcttccatatgataataaaatgttataaatcttactctgcctcagaaaagcttttagtaaatgattatagtactcaatttgggtttatggagaatttcaatgttccagataattcagacacttaaatgtcaatgaaatcccataaaacatatttgaataagataaagtcttcttagctaacaaatttgtattactagtacatttataaaaaaatagaaaaccagtactttaagccaaataacagtatttgacacgttagtagcacccaaacaagtgctcttcacgatcattgttaaagcagcaatagcaccacgtgctttcctgggacctgctggcctgttttccactgatataaagtggagaaggcattgaaatagcaaaggagggtgatataaattgaatacttatatgaaatacaattttaaataaaacatagcacttgatgttgtacaactataggcgagactattagtgtgaggtcatatttttacttatattgacaaaataatcattcacaatattcttatttagaataatattcctgttctgctgtatatttgctagcttttgatcaaatatttgggagctcaatagaaatcaacaaaatgaatctttattttaccacaagcattattgatgcatatgcttgtttttattaaaatccattaatgttttatgaaagattatacttttgctgggtgcggtggctcacacttgtaatcccagcactttgtgatgtaaaatcacacccttgtcttttttgtctttgtggctgaagtcgggtatttatggtaatgcaaaagaagtctaggtctctttttagaagaaagatggtgatgatggaagcaaatataatggtgcatggtacttggccacatttcaaatgggtgataatgaacattcacctaagtgccacaggtggcttttatttaccacatcaaatcttctttgtgaggaaggctcagcccactaatgtcaagcatttttggtggttcctagatagatgaacaaaacctcactgggctgttttaatgagaccagaattaaaaacacccaggtgccaggttattaagaacatttttacacttgtggaaaaaaatgtgatgtggcgtgtggcttggtttgaataaatcttcactgaggtaagtagctgattgaatttacctaactgtaggttaagaaatgaaaataacctctgaccaagtttattttacaggcttatttctgtacatataaaatagatggctagataaacatatacacataaaatgagtcacatggatatgtctacgtaatgtttatttgtgcatagatctcacaaacaaaaaggctcagaaataaagcagatcagatgacatctccgtattctacccctgaagccgaggtaaattaaataagcaaattagcagaacccaggtggttgtaatcagccaatttgcacagcccaggtgattccaaccagcaaattagctcagatgaggtggatccaatcatccaattatctaaatagagactgtggctttatcaaggcaggccccaaatggtggatgtgaacagaacatgcacacactgaggagacatgcagggcactgaaatactaacctggacagataagttacatggttttattttcagcttatttctgtagacttgcccttgaagttaaagctttgttgatatttacataaacaacattgtatggctacgttccattctgacatgttacttagcaaaagaaaaaagaagtaattctacatcagcatgtttagtgcatgccagaagattaaaaatgtcttttggggaatgtattttgtatacataagtatttacatataaatatttatataattatgtgtttgtcttcctatgtatatttatatctagatatgtcaatcttcgtattgatatgcattgctacaaatagtaagataaagagtaacttccagccgggtgcggtggctcgtgcctgtaattccagcacactgggaggccaaggtgggtggatcacctcagctcacgagttcgagaccaacctggccaacatggtgaaaccctgtctctattaaaaatacaaaaattagccgggcggggtggtgagtgcctgtaatctcagctacttgggaggctgaggtcagagaatcatttgaatcttggaggcagaggttgcattgatccacgattgtgccactgcactccagcctggcagacagagcaagactctgaaaaacaaaaacaaaacaaaaacaaaagtaacttccatatatgtataagtttatctgccctataaacaatatcacaaatattacacaaataaaaatatgctctaacatacatcgtgcctcatttaacatatatgaaagcagcagctttttttttgtttgtttcttgcttctgggagataaaaatgcactaaggtgatggaagtcattcattgccatatcaatgtttacccttctctttctgttgcacacagggcaaaagctgaaccagcctcagtctaaagtttctcaccaaaatttgagaatgtttattctttttcattaagactttcatcaagacaggggctcttgtttatttccatgagtgtgcaatgtgaaagtacactgttgtccttttgcctttgtggctaaaatagggactttatggtaatggacagaaagcctaggtttcttttttttttctttgtttttttttttttttgagatggagttttgcttatgttgcccaggctgcagtgcaatggcgcgatttcagctcactgcaacctccgcctcccaggttcaagtgattctcctgcctcagcctcccaagtagctgggattgcaggcgtgcaccatcacacccggatacttttgtatttttagtagagacggggtttcaccatggtggtcaggctgatctctaactctcgaactcaggtgatctgcctgcttcagcctctcaaagtgctgggattacaggcatgagccaccatgccccaccaaaagcctaggtttcttattagtagactgtcatactgaaagcaaatataatggtacgttacttggctgcatttcaaacaagtgatagtgacactacactgaagcaccaaaggtggttcttattggtcaggccagagctccttgtgaaaaaggttagggccactggcatgtctgaaggttcctagctggatggacagaaccccatgggctattttgaatagacactgaatttaaaacaccttggtggccagtaatgaggatattttcacatttagcaaaacgtgatttgatgtgtggcttggagttgataaatcttcactgaggtaatggctgattggatttacccggcctgaatggaaaataaaataaaaatcacctctgacctattcttctttgtggtcttttttatgcacacagatatatatatatatagatagatataagataggtggctagataaacatatacacagaaaatgggtaacacaggtatgtcagtgtaatttccattattgcatatgtcctgcagagaagcctgagaataagtaggtcagacgccatttttcttcccaacttcttcacaccacgtgaatttaatgagccacttagatcagcgtagatggatataagtcaattagctaaattgggaaagtgaaggcatccaggcaggacccaaatggcaaatatgaatcacattggcatacggtgagaaaggaagcagggccctgaaatgctaagctggaactagagtcttatatggctttaccaaaaacatacttcccgggtcatgcacctaaaagtgaaggtttgttcatgtttaaacataacattgtatggctgtggtccaatctgagatggtatggatccgtataggtgagagtaagtttatatctgcatcctcaatgtaggctggggaacttaaaatgtttgttaaggccgggcgcggtggctcacacctgtaatcccagcactttgggaggccgacgtgggcggatcacgaggtcaggagatcgagaccatcctggctaacacagtgaaaccccgtctgtactaaaaatacaaaaaaattagccgggcgtagtggcgggagcctgtagtgccagctactcgggaggctgaggcaggagaatggcgtgaacctgggaggcggagcttgcagtgagccgagatcacaccactgccctccagggtgggcgacacagggagactccatctaaaaaaaaaaaaagtttgtttattaatatcttttgtacaaataaatatctacgtaggcaaacccacataattctatatgtgtgtgtttatctgtctacccatgtatgtctatatacagatctagctatcattttttccatatgaatacagagtaaagatataggaggtaaaaggataaataggtatttgtacttatagcaatgtaaagaaaaacttcaatgactgcaaaatcttatttgccccttaaattttatccataagagtacacaaatggaggtatactctgacctgcatcttgctgcatttgatgttttcaaagaaagaattggtttttgttgctcacaatctgttagcaaaagtgcactaaggccatcgagtcatttattgccaagtcaaacatggcctttttaattctggtgaatgggaaaatatggataaactagccttagcttgaaagccttaatccaaatttgcaaatgagaaataattctctttaaagcttccctcaattttagagcttttattttcaaatatgtgacatagaaatagaatcttcttctctttctttctttcttttcttttttttttgagacagagtctcactctgtcacccaggctggagtgcagtggcacgatctcagctcactgtaacctccgccttccaggctcaagcagttcttctgcctcagcctcctgggtagctgagtttaaaaccacatacgccaccgcgcctggctaattcttgtatttttagcagagatggggtttcaccatgttggtcaggctggtctccaatttctgaccttgtgatctgcccacttcagcctcccaaagtgctaggattacaggcatgagatactgtttccggcttttttttttttttttttttttttttttttgcagagtttcactcttgttgcggaggctggagtgcaatggcaacatcttgactcactaaaacctctacctcccaggttcaagtgattctcgtgcctcagcctcccgagtagctgggattacaggcacccaacaacacacctggctaaatttgtatttttagtagagacggggtttctccatgtgggtcagcctggtcttcaactcctgacctcaggtgatctgcctgcctcagcctcccaaactgctgggattacagatgtgagccacagtgcctggcagaaatagaatcttatcatattgttgtgtttgctcaagtagtaacattttgggtaagaaaattaaacaagaggtctctgactttaagatggactgctatactgaaagcaaatttcagggtgttttcagatgcttttttctttggatttagatacagatataacatatgtagctagagaaatatatacagccaggtgcagtggctcatgcctgtaattccagcactttgggaggccaaggcaggtccttcacttgaagccaggagttcaagaccagccaagccaacatagcgacaccccatctctactaaaaatacaaaaattagctgggcatggtgagaccagctgagccaacatggcaaaatcccgtctccactaaaaatacaaaacttagttgagcatggtagtacacacctgcaatcccagatactaggtaggctgaggcatgagaattgcttcaacatgggaggtggaagtttcagtgaaccatgatcacaccacttcactccggcttgggtgacaaaatgagactctgtctcaaaaagaaaaaaaaaaaaaatacaaagacccagggtcatagaaacatatagagacatacatatgtaacctgaatttgtgactatgttttataacatctcacaaatgtaaagtaagtcagaggttatgtccgtactcatgctcctcaagatagatgaatgcgattccatgaggcaaatttaataagccaatgagctcaagtcagctgttttcaatcagccaattagctgagcccaggcgattcctattagccaattagctcagcgcaagtgattccattaggccaattatgtcagcttaggcaattacaatcagtaaatttgctcagcccaggtgattacatttcgccaattgactcaatccaggtgattccaatcagtaattcgctcagcctaggtgactttaaacagccaattagctcagccttaacaatttcaatcagtcaatgagatcagcccaggtgactctaattggccaattaactcagcctcagtgatcctaatcagaaagctcagctcatgtaattttattttacttttttgacggagtctctcactctgtcgtccaggctggaatgcaatggcatgatctcggctcactgcaacctccacctcccgggttcaagggattcccctgcctcagcctcccaagtagctgggattacaggcatgtgccaccacacccagctaattttgtatttttagtagagacaaggtttctccatgttgtgcaggctggtcttgcactcccgagctcaggtgatccacctgcctcggcctcccaaggtgctgggattacaggcatgagccaccgcacctggctagctcatgtgattttaatcgggaaattagctagagaaattctagagaatccaatcagccagttagttagaactgtgattccaatgagtcaattagttcagttcagaagtatctaattaaccaattagctcaggttagttgatttcaataagacaaatagttctgcacaggtggatcaaatcagccaataatctaaatagtgactgtagattcattagatcagaatggcagatttaaacagcatttttctacactgagaagaaaagcagggcccaaagactctaatctggtcataaagcattacattgctgtattgtcagcttgtttccaagaccttgcctttgacagtgaagctttgtttatgtaaacatcattgtatgtctgtgttccattatggatttctattgtgccataaagtagactagtaagtccacatctgcattcttagtatatactaaggtattaaaaatgtcatttgctgaaatcttgtatattaataaacatttatgtaattataattatataattctgtacgtgtgtgtttatctacctacatccagatgtatccaggtttgtacctatattcacaaaaaataaagatgtagaaggtgaaagtgttgatcgtaattgatatcaatagtaatatacaaagataattccatagaggtataaaattttctgccgtatgaaatatacctagaatgctactcaaatggatgtatgctattacctaaatctatcatcatttaacttatacaaagtaagcatagttttttttttttaatggagtcttgctctgtcaccaggctggagtgcagtggtgctatgatcttggttcactgcaatctccgcctcctgggttccagtgattcaactgcctcagcctcctgagtagctgcgactacaggtgcctgccaacaggtctggctaatttttgtatttttacttagaggcaaggtttcaccatgttggtcaatctggtctcaaactcctgacctctggtgatcagcccacttcagccttccaaagtactgggattacaggcgtgagccaccgcgcctggccagacactttcttctgtagatttggaaacagatataagacacatatggctgggcatggtggctcacacctgtaatcccagcactttgggaggccgaggcaggcagatcatttgagatagggaattcaagaccagcctggccaacatggagaaaccttgtctctactaaaagtacaaaaaaattaggtgggcattgtggcacatgcctgtaatcctggttactcaggaggctgaggcaggagaatcacttgaacccaggaggcagaggttgcagtgagctgagatcatgccattgcactccagcctgggcagcaagaatgaaactctattttaaaaaaaaaaaagacatgtatataggaaaacataaacaaacacaaaggcttatatacatatgtctaattaatgcctatttgtgagtatgtcttgacaaaaagccccaaaagaaaagtatgtaaaaggttattaccttactcattctcctcaagacacaatcaatgaactcagcccatgtgaccctagtcagccagttagctcagcccaggtgattacaatcagccaattaaacgagcccatgtgataccaattagtcaattatatcataaaggttaatacaattagccaattagattagcccaaggtgattccaatcagccaattaaatgagcccaggtgataccaattagccaattatatcagtattggtgtgttggtgtgatcagacccaacaccgggttgtgggggtgacaaagtccagtggagtcaaaggattgagaaaaagtttgagagagaaaagtgggaccagggggccattgctagtgtatggaggctgcgaaggccccgagctctgggatgccatgctatttattggtaatccaacaaagaaacagatggtgagaatgtggggtcgaaagggcaagtgcatgatctacagctgtgatggtttagcatatgctctgctacttgagataatggagagcaggttcttttaactcaagatacagtcaatcctggaagagcaaggagcaaggagccagcaagtctagacacattccagggccacgagccctggattctattcaagccatgagggattttatgccctgggcttagattatggtgcttcagtgtagccttccaccctttagcacagagcttggtgttccaaaggccacagaagtttttataccctggaccccagacatgttccaagactcttttacattatgtcagacatgcaagccctgcctcagcttctctcccaacactcagcttttctcccaacatgccccccttttctttttcataaaaccgccacagctatcattgcttgttcttgaagtcagctttctctcagaggtggcttcatcttcagaggcagctttcgcatctgcagactaaaagaagacagcacaagcacacaaccaccagaacaaaatccacaaatgtagagcctccaatggccttcaactataaatcttttagaatgggataatagttttttaagggtctcagttacaatataaatagatggtgatgtctccatggtctatttagaggtacagggatccaaactccttctctggctttaattatcaagatagtttgatttttatcaaaggttgaattaatgtaggtaaacaagtgacattcggggcaagtaataaggcatatatttatatcaagagtaacatttcctattgctagcacaactttgaatccaaaaggtcctgttggagagaaaagaaagagcatttttatccttaccttcctcccctctattccttgtatatttgccctctcagattttgcttggactttgagccatagctaatttccataattcagaatgttcctgtctgtccctgcaaatctctgctagtctttgctagcctcaacttttgtacctctttagggcactgaccttatattgctagtctttgcttttgtacctctttagggcactgatcttatattgctagtcttcatctatctctatttatctctatctctctatttatctctgtttatctctatctctctatttatctctatctctctatctctatctctacttatctctagctctacttacttagctctacttacttagctcttattcaaaatggagttgctctggtttgaattcttcccacatatctcccttttcccttttacaagaggacccttaatcctaggggttgcagaaggatgaaggtccatcttctgtaacttcttcatgctgaataggagtgacgataatcctgcctaactattagggactcttgtattcagggtagagaggagctcagtcagaaagcattggtccgttaagcatccataggtaaaaccctggcattccagtagtttctcagcttcctgtgctgttttcttgctctgtcccatgttataggggttgcatccacatggtttcattcatctcctgcaaaaacacaagcgtaccctcgatcccacattagtaaacctagcgaaacagaagcaaaaagttttgtggttgtaactgggaggcatgccattgctgaagcatttgttaactcagcttctgcctctttggttaattacagtgaggtaaaactttccactgataatgagaaacaggccccttctaacagaaggcacagagaaagcaaatcaaggcttctcaaaccttcaatttgcactgtaccggtgggcccactagatgctgtggctcatgatagatcttcagatatttggtgggtaccccattgttgcaataagtctctaccccataaattgactggaagaggtgtaataatatgctgaattgtcccttcctgaccaggtgtcccttgacatggtaaaatcaaggaactctgaaaaacttcctaggctgttcctatgccaatgatacccatggaagcctttagtttgggccagtgctggggccattgatataaagcaataatagagacaccagctccagtatccactagtccttcaaaatcctttccctgaatagttactgtgcaaataggtcttttgtcaaacacttgaataacccaatatacagcctttcttgctgaattagtactaccaaagcctcctgttcttttcactgtgctgcttcctggttttatgtaaggtaagagccacaactgagcaattctttctcctggggaagcagaccacggagttgaggaactaataactaattgaatttctccactataatcacaatcaattattcctgtatgcacagcgacacctttcaaatttagactagaccttccaagtaatagatgaactgttcctgagggtaagggtcccctaactcccatagggaccttctttggttgctcccctggaagtaaggagactggaattgtgctgcagaggtctacggcagcactgcctgctgtgcaaggaaacaattgttgtacatttgtaagggcactggctgtgtcatatatgcctcagtttgttgaggtgctctctgaataaacaagcctcagattccactgggtcttaccgcatgcctcaccctcttcataataaattccttaagaaattcaagtaagcagaatgtttgctttcactttgtgccattgttatcctggttcttccgagcattccgctttcctaccgagcttcttttagttgtccttgggtgtcctttgaggatgcgtcatccactttcacacactgtagggtttcttcaccggggtctctgttgccccacattgggcagccaggaatgttggggtaatcagacccaacaccaggtcgtgggggtgacaaggtccagtggagtcaaaggattgagaaaaagacagtttgagagagaaagatgggaccaggggccatcgctagtgtatggaagctgtgaaggcccagagctctgggagcccacactatttattggtgatcaaacaaagaaacaggtggtgagaatgtggggttcgaaagggcaagtgcatgatctacagctgtgatggtttagcatatgctctgctacttgagataatggaaaggagattcttttaactcaagatacaatcaatcttgggagagcaaggagccaggagccagcatgtctagacacattccagagccattagccctctggattctatccaagccacgagggattttatgccctgggcttagattatggtgtgtcagggtagccttccatcctttagcacagagcttggtgttccaaagaccacaaggggttttagaccctggaccatggacatgttccaagactttttacattatgtcagacatgcaagccctgcctcagcttctctcccaacacccagcttttctcccaagaatggtgaatctaattagccaattagattaacacaaggtaattccattcagccaattttcttagtctagttagatccaatgagccaattatctaaatagtgactacaggtttatcaaaacaggcccaaactagtggatgtgaaaagcacatacaaacattgagaaggaatgcagggtcctgaagtgcaaacctgaactgcatgagtaacctgacttagtgtcagcttatttctgaggcctatgctactgaagattaaggattttttatgtttataatattgtatgtctatgttcaattctgaaatgctactgagcaaaagagattgaaagtaattatatatctgtaattatatatcaattctgaaatgctactgagcaaaagagattgaaagtaattatatatatgtatataagttctagatccatgaggatctagaactagaaatatgatttgacccagccatcccattactgggtatataccaaaaggattataaatcatgctactataaagacacatgcacatgtatgtttattgtggcactattcaaaatagcaaatacttagaaccgtcccaaatgtccatcaataataggctggataaagaagatgtggtacatatacgccatggaatactgtgcagccataaaaaagcatgagttcatgtcctttgcagggatatggatgaagctggaaaccatcattctcagcaaactatcacaaggattgaaaaccaaacaccatatgttctcactcataaggggagttaatcaatgagaacacatggaacagggagggaaacatcactcactggtgcctgttgggaggtggggggttgggggagggatagcattaggagaaatacataatgtaaatgatgaattgatgagtgcagcaaaccaacctggcacatgtatgcctatgtaacaaacctgcacattgggcacatgtaccctagaacttaaagtataataataaaaaaagattttaaaaatcatattcttaaagagtgtaagctaaaaggcagctagttgattctacaaaggtcagaaaattgacttgtgtgtaagaagcctcactgatacaagctatgagatttgggatcactgcttgaattcatggagtctatcaaaatatcattattcctttccactttgtagaatcatgagtcctaagggtaaataatatacagaaataaagtaaaatcagaagcttcaaacacttaacatcttcaaactaatagtacctatagtgtcaaccagagaatataagggcaaccagcaggtggtggaaatatcagcaaacaaaagaaggttggtgtaaaccagctggccagagttctgtggaaagagaatagttgccaagagcaagagaaattaagtctatcatttttcctacctggaaaccaccaaatagaaatgcctgttatactggaagtaacttgtaaaacagaaggttgttgaagaggtggggatgtcattaaaacattttaaaagcccataaaaatcttaggaaaatttcttactcttcaagaaagctttaagagtacatccagcatgggccacatgtatctaagattactcagatccagctggtttctctttgacactttatggcaaactaaaatctatcttccaaaaaaacagtgaagcattgaccttagatatttaattgtctattgagatgacaactcaatgaccttgtctagtttggaaaatacaaagaaatagccatttaggtaaccgtatatgagccagaatttggtggaatctaatcttatatatggccctaactctgaccattaatgagatgttgggttccattagttcattttatttaaaaattggaaaacatattaattcttgcaatagtctcatccctatgcaagcaggtgtctctttgcttatgaagataattagaccataggtttgatggcactttgactttaaaaaaaagacttactaggttgttttttttttttttccaaaaaaaggagagacagtcctgattaggtctctgttgccaaatcctaaagattctaggccctataaagtgagacattaaaaggattatgcatcataataaggccattctgggtaaagtcatttctattcatctccattactttgagagtaatctgtcaaagacaaattaactgccagaggaaacttatgaaaaaatatttgttctcaaaagctgtaacgtatttattttaccttcagtctccacttgccaaaaccataaattgcagaatatctccattaaagctcatgccaaattccaagtctctcctctggctgtcatttgcgagatggctcctcttcaggttcctgttagctatgtgcaaagacagcctaggcaatgacaaatcaagagataaataatttctgagatttcctgagttgattctttcgatcccagcactgcttttcattagaatttctaagtccctcttcctataacagaactaccagccccaatgtgcttgggagcaacttatttgctctggaaattagcacaatatgaagactcaaggctgagacctacaaaacttgggttcaagttaagttgttttttgtttgttttgtttgtttttatcaaatgggagtatgactttgagtttatcacctcacatcctacttggaggatccaaagcatttttctttgagcgtactcttgagatatcataaatacaatcccattgttaggagaggtcccagagcccaattccaacccacttgtccttgaaccttctctaaaacaacctgaaaaagaatggtcttggagcttatgcctgaaagcttccatgccagagaactcacccccacccactgccaccaccagaaaaccagtccagctgccctgtttgtttggtttgattcagttgtgaagcagctttgtagagagtgaagagcaagatactagaaggtacacaaacttcagtgttatggaaaattgattgtatttctatcctatgactaattatttgtcctcacttttgtttacaaaatagaaggctattataaccttgtgtcttacaagtttggtgataattacaaacaggctaagcattcagtaaaacatcatttttctcctatttgctctaactgaagacaggattactttgaatgaccagaacagtcgtatgcttgcaatagctaatttacaataactctagagttcttgaagtttgccctagggcattaaagatgccaactatggcctatgagaaatatcaaagcatgagacaaggccattcaataagaagaggtcagaaatttctcaactgctgcaaaattttttagcaataaactcatttctggtaagtcttttacatcacccactcctacctttacatacaaatgtgaattattacctaatttttgtatcagtgaaagaatttgaggatagcctgaaatgatattgtgggttttggagcttacaaatcttggagaaaacttatctcagagtcaaacatggcctggtgattacctaattcccaggtaggcctgtaaagtctctctgcgatcctgctggcaaatgctccctgtcttcattacacaagaccagccacggaaacaaatgggtatcagttattttaactccaactcttagaaagtgcttgtatttaagtttttgatcaaatgtatctattcatatgttttggaaaattaaatcgaatagagagattaaaatgaaaaataaacttcctgccccatgcctaacagtctctaacctcttttcgtacaggctaactgtgtttggccttttctgcattgctacagagaaatatctgaggctggataatttataaagaaaagaggtttaattgactcctggttctgcagcctgcacaagaaatgtggtgccagcatctgctcagcttctggtgaggcctcagggagctttactcggcagaaggtgaaacacctcccaccaggcctcaccgccaacactggggattacatttcaacatgagatttggaagggacaaatatccaaactatatcagtaacactatttaactcttaaaactatttctaggctgggcatggtggctcgttcctgtaatcccggcactttggaaggcaggtcacttgaggtcaggagtttgagaccagcctggtcaacatggtgaaaccccacctctacaaaaaatttgaaaattagctgggtgtgatggtgcatgcctgtaattgcagctactcaggaggctgaggtgagagaaaggcttgagcctggggggcagaagttgtagtaagccaagattatgccaaggcactccagcctgggggatagagcaagattctgtccccactcccacacacaaaaaaaagatttctaaacttatatttctgattatcatccacctttaatctgttattgcactatattccttgattaatttgaaatagcatttactgacgcgctattctgacaaaagatttaacttccttatatcatcccaagccttcccttaatactcctgccagtatgattctttgcctactttttttgtttttctattaattacttttgtaactttaaataaatgttcaccattatatttctttttacagcaactataggaaatacctcttctctagttgagataaagtttattctctaatttactaatgtttcaaagatcacctgaccttatttgcagagataatattttttaaatctcaaccttgcaaactgtcagggttgataatatttgcattcctttccaagatgatacctgtcttctgtcctttatctatggtttattatgaaagcaggaagtgaatcatgttttgtttgttattcctcttccaagtactatttgctgcagaaccaagcccttgtttaggattaattttgtgggttttgtatagctatttggatttttctggagtttctaattctcttcttacttcttcatattgtctttaatatgtttttaagtagttctatcttcctagggatcatatgaaatctatgaaacaccattttttacaaaatgtctccttgttggagcctctgttttcttccttctgtctggagtgctgcttccaggcctgctccaaagctgcatcctggcactcctccttctctcggtcaccctggatccacctttctttggatcccatgtcttccacattcttagcctcctcattttgcttaagaaaatcatccagtaacatcctaagaaagtttgaggagaaacttcttagtttctgtaaatatttttttattctctattcatccagattgagtgtttggcttggtatttttctctttttttggttttgcaatgcatttttctcttttttataatactttaagttctagggtacttaagttctaggtttgttacataggtatacatgggccatgttggtttgctgcacccatcaactcgtcatttacattaggtatttctcctaatgctatccctcccccagcccccaaccccctgacaggctccagtgtttgatgttccccaccctgtgtccatgtgttctcatagttcaactcccacctatgagtgagaacatgcggtgtgtggttttctgtccttgtgattgtttgcttagagtgatggtttacagctttatccatgtcactgcaaaggacatgaactcattcttttttatggctgcgtagtattccatggtgtgtatgtgccacattttctttatccagtctattattgatggacatttgggttggttccaagtctttggtatattgcatagtgccaaaataaacatgcgtgtgctgtgtctttatagtagcatgatttataatcctttgggtatatacccagtaatgggattgctgagttaaatggtgtggctagtcttaaatccttgaggaatcactacactgtcttccagagtggttgaactaatttacactcccacctacagtgtaaaagcattcttatttctccccatcctctccaatatctgttgtttcttgactttttaattatcaccattctaactggcatgagatggtatctcattgtggttttgatttgcatttctgtaatgaccagtgatgatgagcattttttcatatatctgttggctgcgtaaatgtcttcttttgagaagcatctgttcatatcctttgcccactttttgatgaggttgtttgtttttttcttgtaaatttgtttaagttctttgtagattcgggatattagccgtttgtcagatgggtagattgcaaaatttttctcccattctgtaggttgcctgttcactctgatgatagtttctttcactgtgcagaagctctttagtttacttagatcccatttgtctattattgcttttgttgccattgcttttggtgttttatttacgaagcctttgcccatgcctatgtcctgaatggtattgcctaggttttcttctagagtttttacagtgttagctcttacatttaagtctttattccatcttcagttaatttttgtgtaaggtgtaaggaagggatccagtttcagctttctacatatggctagccagttttcccagcaccatttattaaatagggaatcctttccccattgcttgtttttgtcaggttcataaagatcaggtggttgtagatgtgtggtgctatttctgaggtctctgttctgttccattggtctatatttctgttttagtaccagtaccatgtcatcttgattactgtagctttatagtatagtttgaagtcaggtagtgtgatgtctccagctttgttctttttgcttaggattgtcttggctatgcgagctcttttttggttccatatgaaatttaatgtagtttttccaattctgtgaagaaagtcattggtagcttgatggggatagcattgaatctataaattaccttaggcagtatggccattttcacgatattgattcttcctatccatgagcatggaatgatcttccatttgtttgtgtcctctgttatttcattgagcagcagtttgtagttctccttgaagaggttcttcacatcctttgaaagctggagtcctaggtattttattctctttgtagtaattgtgaatgggagttcactcatgatttggctctctgtttgtctgtttttggtgtataggaatgcttgtgatttttgcacattgattttgtatcctgagactgctgaagttgcatatcagcttcagcaggttttagcctgagatgatggggttttctaaatatacagtgtcatctgcaaacagagacaatttgacctcctcttttcctaattgaataccttttatttctttctcttgccaattgccctggccaggacttccaatactatgttgaataggagtggagagcgaaataatcattgtcttttgcctgttttcaaagggaatgcttccagtttttgcccattcagtatgatatgacaaactgtaggtttgtcataaatagttcttattattttgagatatgttccatcaatacctagtttattgagagtttttagcttgaagcattgttgaatatttttgaaggacttttctgcatctactgagataatcatgtggttttttttcattggttctgttaatgtgatggattacctttattgatttacatatgttgaaccagccttgcatcccagagatgaagccaacttgattgtggtggataagctttttgatgtgctgctggattaggtttgccagtattttactgaggattttcacatcgatgttcatcagggatattgacctaaaattctctttttttgttgtgtctctgtcaggcttttgtatcaggatgatgctcacatcataaaatgagttagggaagattccctcttcttctattgatggaaatagtttcagaagaaatggtaccagctcctctttgtgcttctggaagaattcagctgtgaatctgtctggtcctggacttttttggtgggtaggctattaattattgcctcaatttcagaacctgttattggtctattcagagatccaactctttcctagtttagacttgggagaatgtaaatgtccaggaatttatccatttcttctaaattttgtagtttatttgtgtagaggtgtttatagcattctctgatgacagtttgaatttctatgggatcagtggtgatatcccttttatcattttttatttcatctatttggttcttctctcttttcttctttattagtctagctagtggtcttattttgctgatcatttcaaaaaaccacctccaggattcatcgattttttaaaggttttttttttgtctctatctccttcatttctgctctgatcttagttatttcttgtcttctgctagcttttgaatttgtttgctcttgcttctctattcttttaattgtgatgttagggtatcgattttagatctttcctgctttgttttgtgggcatttaatgccataaatttctctctacacactgctttaaatgtgtcccagagattctgatacattgtgtctttgttctcactgatttcaaagaacactttatttctgccttcatttagttatttacccagtagtcattcaggagcaagttgttcagtttccatgtagttgtgtggttttgagtgaatttcttaatcctgagttctaatttgattgcactgtggtctgagagacagtttgttgtgatttctgttcttttacatttgctgaggagtgttttacttccaattacgtggtcaattttagaataaatgcaatgcggtgctgagaagaatgtatattctcttgatttggggtggagagttctgtagatgtctatgaggtctgcttggcccagagctgagttcaagtcctggatatccttgttaattttctgtctcattgacctgtctaatattgacagtgggatgataaagtctcccattattattgtgtgggagtctaagtctctttgtaggtctctaaggacttgttttatgaatctgggtgctcctgtattgggtgcatatatatttaggatagttagctcttcttgttgaattgatctctttaccattatgtaatggccttctttgtctcttttgatctttgttggttcaaagtctgttttatcagagaccaggattgcaacccctgctttttttttttgctttccatttgcttggtagatcttcctccatccctttattttgagcctatgtgtgtctttgcacatgagatgcatctcctgaatacagcacaccaatgggtctttactctttatccaatttgccagtctgtgtcttttaattggggcatttgaccccaatatatttaactttcttcatgaaaagcaaatttttgctttttttacacactctttatgcagaattgtttttcttagatctagtagtttttattatatatattaattacattaactcttaaaaacctaatttttagtgaaatccctaggaagtaattttggagtgtttggcatcagtatttgtagacaaaaaccattttatatttttaatagaagtttttttccaaattctctgttaattagcagatctaaatatgattagcttttctatatcatataaaaataagattctggtcaggcatggtggctcatgcttgtaatcccagcattttgaaaggccaagacacaaagattgcttaagcccaggaattcgaggcaagcctgggcaacatggaaaaaccccatgtctacaaaaaatacaaaaattagctcagcatggttacctacaccggtagtaccagctacccaggaggctgaggtaggagaattgcctgagcccaggagattgagagtgcagtgagccatgataaaggcacttcactccatcctcaatgacagagactcttttttaaaaaattaaatgccaaagcagataaagtagaacttattggactttgggggctggggcttgtttttattattatctcaacagctttgtggctacaggtggtgtttgattacataaaagtttttcagtggtgatttctgagattttagtgcacccatatcccaagcagtgtacactgtaccaaatgtgtagtcttttatccctttctcccatctctttcttttccccaagcctctggagttcattgtataattcttattctttccttttttttttgagacagtgtttcgctcttgttgcccaggctggagtgcaatggtacaatctcagctcactgcaacctctgcctcctgggttcaagtgattctcttgcctcagcctcccatgtagctgggattacaggcatgcgccaccacacccagctaattttgtatttttagtagagacaaggtttctccattttggtcaggctggtcttgaactcctgacctcaggtgttccacccacctcggcctcccaaagtgctgggattacagttgtgagccccagcacttggctagctcatgtgcttttaatcaggaaattagctatgttctagagaatccaagcagccagttagttgaaactgtgactccaatcattcaattagctcagttcagaagtatctaattaaccaattagctcaggttagttgattccaataaggcaaatagttctgtacaggtggatcaaatcagacaacaatctaaatagtgactatagattcattaagtcaaaatggtggaagtaaatagcacttttctacactgagaaaaaaagcagagcccagacatgctaatctggtcataaaggattacattgctgtattatcagcttatttccaagaccttgcctttgaatgtgtatctttgtttatgtatctgtaaacatcattgtatggttatgttccattttggatttctattgtgccataaagtatactagtaagtccacatctgaattcttagtatatactaaggtattaaaaatgtcatttgctgagcatcttctatattaatagacatttacataagtgtacttatataactctgtatgtgtgtatttatctgtctaactatatgcagatgtatccaggtttgtatctatattcacaaaaaataatgatgtagaaggtgaaactgttgattgttgatatcattagtaatatacaaagataattccatagaggtataaaattttctgctctatgaaatatacctagaatactcctcaaatggatgtatgctcttacctaaatccattggcatttaacttatacaaagtaaccattggttttttgttttgttttgtctttgtttttttgagtcagactctcactctgtcaccaggctggagtgcagtggtgcaattatctcggctcactgcaacctccacctcccaggttcaagcaattctcctgcctcagcctcccaggtagctgggactacaggtgcctgccactgtgcctggctaatttttgtatttttagtagagatggggtttcaccatgtgggtcagggtggtctcaaactcctgacctgaagtgatcaacccacatcggccttccaaagtgctgggattacaggcatgagccaccgcatccagccggacactttcttctgtagatttagaaacagatataagacatgtatataggaaaacagatacaaacacaaaagcttatatcatatgtctaattaatgtctatttgtgagtatgtcttgaaaaaaagccccccaaaagaaaaatatgtaagaggtcattaccttactcattctcctcaagacgcagtcaatgaactcagcccatgtgattctactcagccagttagctcagcccaggtgattccaatcagccaattaaaggagcccaagtgataccaattagtcaattatatcagtacaggtgaatccaattagccaattaggttagcccaatgaaattccaatcagccaattaaatgagcccaagtgataccagttagccaattatatctgtaaaggtgaatctaattagccaattagattagcccaaggtgattccattcatccaattttcttagcctagttagatgcaatcagccaattatctgaatagtgactgcaggtttatcaaagcaggcccaagctactggatgtgaaaagcacatacctacattgagaaggaatgcagggccctgaagtgccaaacttaacagcctgtataacgtgactttgctgtcagcttatttctgaggcctatgctactgaaggtgaattttttttatgtttatacaaacaatattatatggctatgtttggttctaaaatgctactgagcaaaagagattgaaagtaagtatatgtctgtataattagtatatgccaagtgattgaaaatggtctattggggaacatttcttgtatacataaatatttacataaatatactcatataatcctttatgtaagttttaaaaatctatttacctgcccaggaatggtgactcatgcctgtaatcccagcactttgcgaggctgaggtgcatgcatcatgaggtcaggagttcgagaccagcctggccaatatggtgaaactctgtctctactaaaaatacaaaaattagcctggtgtggtggcacttgcctgtagtcccagctactccagaagctgaggtaggagagtcacttgaacccgggaggcagaggttgcagtgagccaagattctgccactgcactctagcctgggtgacacagcaagactctgtccccatctccaacaaagtaacttctatacatgtataaatctatttgccctgtaaactagatctagaagagtacacgaatagaagaatgttgtggcatacatcctgctgcatttaacatatacgaaggaagcactggtcttttttgctcactcctggaaaatgaacatgcactaaccaatgggagtcattcactgccatgtcaaggttgacccttcccttcatgttgcacatatggccagaggtgaaccagccccagtcctaaggttctcacctaaattgtgaaatgcttattttttctcatctgggctttctttaagacatgggatcaacttcatttttatgagtatgtaacgtaaaagtacaatttggtctcttcatctctgtggctgaagtagtgtcattatggtaacggatagagtctagcactctttctggaagatagaccatcatactgaaagcaaatgtaattaattgttcatggtaccagaacacatttcaaccagaccatagtgaacattcacagaagtgccaattgtggcccttattggccaggccaaaacttctttctgagtaaggatagtcttactgatgtcaagcattcctgctttttttttttttttttttttaactggacagaaacccactaggctgatttattgagattcacaaataaaaagacctgggtgccaggtaacaaggacattttcacatttatgaaaaaaaaagtgtggcttttggcttggattttataaatcttcactgagctaaccatctgattggatttatgtagcctggaagtaaagaaaatagaaattaccttttaccaagtttacttcagtgccttttttctgtaaatgtaaatatggatataagataggttgatagacaaacatacacacaaagaatgagtcacatatgtatgtataggtcaagtttatttgtgcatatgtcccatataggacagaggtcatcttcatttctacccctgcatcccagataagttaaataagcaaattacctcagcctgtgtgattgcaaaaagccaattaggtcagatcaggtaaatataaccaactgattagctaaactggaaaagtgtagacatcaaggcaggctcaaaatgatggttgtgaataacacaggcataccctgagaagaaaagtaaggatctaaaatgctaagccagacataaagccttacgtcacactacgaatgtattacttcacaggccatgctcataaacatgaagtttcttcatgtttatacataacactttatggctgtgttccaatctgagatggtataaaggcatataggtgaaaagtaagtcttcatctgtgtcctcaggttaggctggaaaattagaaatgtctattgatgaacatcttttgtatgcataaatatttacatatacaaactaatataatcctgtatgtgtgtgtttatgtacttacatatatctatagccaggtctatctataattctgttaacattcatacagaataaagatatagcaaggcaaagtataagtgagcagtggttcatgcctgtaatcccagcactttgggaggccaaggcgggcagataatgaagtcaaaagatcaagaccaacctggtcaacatggcgaaattccgtctctactaaaaacacaaaaatcagctgggtatggtggcgcatgcgtgtagtcttagctactcgggaggctgaggcaggagaatcacttgaacctggaaggtggaggttgcagtgagcccagattgcaccactacactccagcctggtgacagagtgagactccttctcaaaaaagaaaaagaaataaagggcatccaaattggcaaagaggaagtcaaactgtcactgcttgtcaatgatataattgtatacctagaaaaccctaaagactcattcaaaaagctcctagatttgagaaataaatttactaaagtttcaggatacaaaatgaatgtacacaaatcaatattgcaggtatacaccaacagtgaccaagctgagaataaaggcaagaactcaaccactttacatcagctgcagaaaaaatatacttaggaatatacttaaccaaagaggtgaaagacctctacaaggactactacaaaacactcctgaaagaaatcaaagatgatacaaacgagtggaaatacatcccatattcatggatgagtagagtcaatattgtgaaaatgatcatagtgccagaagcaatctacaaattcatgccattcttgtcaaaataccaccatcattcctcacagaactagaaaacacaatcctaaaattcatatagaaaaataaaaaagcctgcatagccaaaacaagactaagcaaaaagaacaaatcttgagacatcacattatctgacgtcaaagtatactaggagactattgttaccaaagcagcatggtactggtataaacataggcaaatagaccaatggaacagaatagtgaataaagaaataaagccaaatactttcagccaactgatcttctacaaactaaacaaaaacatgaagtagggaaaagacatcctattcaacaaatgctgctgagataattagcaagccacatctagaagaataaaactggatcttcattgctcactttatgcaaaaatcaacccaagatggatcaaagacttaaatggaaaacttgaaactacaaaagttctacaagaaaacattgggaaaaactcttctacacattggcttaggcagagatttcatgaccaaaaacccaaaaacaaatacaacaaaaacaaagatcaataaatgtgacttaattaaactaaaaagcttctgctcagcaaaataataataatgataatcagaagagtaaacaaacaacacacaaagtgggagaaaatattcacaaactatgcatctgacaaaaaactgacaaagtttctacaagaaactcaaacaaatgagcaaaaaaccccacaaactatcctataaaaaagtgggcttagcacatgagtaaacaattctcaaaagaagatatacaaatggttaaaaaacattttaaaaagtgctcaacatcactaatgatctgagaactaaaaatcaaaccacaatgtgatatcaccttactcctgcaagaatggccataatcaaaaaaatcaaaaaatgacagatgttggtattgatgtagttcaaagggtacacttttacactgctgatgggaatataaactagtacaagtactatcaaaaacagtctggagatttctaaatgaattaaaagtagaacttccatttgatccagcaatcccactactgggtatctacacagagaaaaataagtcattgtttgaaaaagacacttgcacatgcatgtttatagcagcagaatttgcaattgaaaaattgcaaatgttgggaagcaggctaaatgcccatcaaccaatgagtggacaaagaaaatgtggtgtatatataccatagaatactactcagccacaaaaaggaacaaaataatggcattcacagcaaccttggtggagttggagattattattgtaagtgaagtaactcaggaatagaaaattgaacaccatatattctcatttatatgtgggagctaagctataaggatgtaaaggcttaagaattatataatggggagggtgcggtggctcacgcctgtaatcccagcactttgggaggccaaggcgggtggatcacctgaggttgagagttcgagactggcctgaccaacatggagaaaccccgtctctactgaaaatacaaaattagccaggcgtggtggcacatgcctgtaatcccagctgcttgggaggctgagacaagatagcgcttgaacctggaaggcagaggttgcagtgaggcaagatcgtgccattgcactccagcctgggcaacaagagtgaaactcaaaaaaaaaaaaaagaagaagaagaagaagaagaattatataatggactctagaggcttgggggaaagaacaggaagggggaaagggataaaagactacacattgggtactgtgtacactgcttgggctataggtgcactaaaatctcagaaatcaccactaaaaaactttttcatgtaatcaaacaccacccatagccacaaagctgttgagataataataaaaacaaccccccgcccccaaagtcccataaaattaattttatatgctttggcatttaattttttaaaaaagagtctctgtcatcaaggaaggagtgaagtggcttgatcatggctcactgcagtctcggcctcctgggctcaggcaattctacctcagcctcctggttaactggtactacaggtgcaggtaatgatgccgagctaattttgtattttttgtagacatggggttttgccatgttgcccaggcttgcttccaattcctgggcttaagcagtctttgtgccttggcctttcaaaatgctgggatcacaaacgtgagccatcgtgcctgaccagaatcttatttttatatgatatagaaaagctaaacatatttagatctgctagttaacagagaatttgaaaaaacgtctcctattaaaaatgtaaaatggtttttgtctacaaatactgataccaaacagttctaaattacttcctaaagatttcacaaaaaaaattaggtttttaagagttaatgtaattaatatatataattaaaactaccggatctaagaaaaatacttccacatagtgagcaaacataagaaaaatatactttcaatgaagaaagccaaaaatattttgtctagtttgaaattacttaaattgtctcaaattgaaaaaataaaaagaatgtagataaaaataaaatacagaaacttttaaaagtaatttaaaaaaggtcgggtgtggtggctcatgcctgtaaacccagcatttcgggaggccgaggcaggtggatcacctgacgttgggagttggagaccagcctgaccaacatggagaaaccgaatctctactaaaaatacaaaattagccggacatggtggcgcttgcctgtaatcccagctacttggaaggctgaggcaggagaatatcttgaacccgggaggcagaggttgcagtgagccgagattgcaccattgcattccagcctgggcaataaaagtgaaactccaaataaaaaaaaaagtaattaaaaaaagtataagctatgtatggaaatctagagtggtcaaaatgatatatttgatggatttatttataaagttttatgaaaattagcttttaatttttttaaaattttaaaattttaatttttattttttgagatggagtcttgctgtgtcacccaggttggagtgcagtggtgcaatcttggcccattgcaacttccacttcctgggttcaagtgattcccctgcttgagcctcccaagtagctgggactacaggcacctgccaccatgccaggctaatttttgtaatttagtagggacggggtttcacatgttagccaggctggtctcaaactccttacctcaggtgatctgcctgcctcgacctcccaaagtgttgggattacaggcgtgagccactgcgcctggtcaaaattagctttagtattgatagcacactaatacaaaagtataagttgattttctcttgaacaaaaattttgtgtattattactataacacaataacctatttttattcaccttttgaattaatttaaaaagagggagagtagagatgggtttttctcatgctgtctttcttgggtcatttgactggaaaactgaatttcctgcatcgaacagtaaaaggttttgtttttataagtcttctaataggccaggcactgtgactcatgcctgtaatctcagtactttgggaggctgaggcaggcggatcacctgaggtcaggagttcgagaccagcctggccaatatgccaaaagcccgtctctactaaaatacaaaaattagccaggcaaggtggtgaccgcctgtagtctcagctacttgggaggctgaggcaggagagttgcttgaacccaggaggcagaggttgcagtgagccaagatcacaccactgcactccagcctgggtggcagagtgagactctatctcaataaataaataaatacataaataaaaataataaataaatcttttaattattgctttggctaaatgaatgattattatttaatagtggactgtgatcccattttgttcaagtattttaaccctttgacatatttggcaggcttcccaaaattaaaattcagcttaaaagttgtgtgtatttgacccctaatatttgaatgctacataagtccaatgcagcatttgaaagagtgataaacagaattctttgatatgttaaattacatggaaagcattgtcaaattaaaaatttgacctttatcaacatattttaataaatgttatgatattcatttcaaaattatatgaaatctctaaaaatccaatgtatctgagtatatgctactagtaataattatggtttttatgataaattattatagactacaggtataatcattttttcatttatttcttcataaccattttaagtcattttcacagttaatggtttaattctgatgtagtttctaaaaacttcaaaagcacataacatcctagaggactgtgtctttaaagagttgtacgaaaagatggaaagggtccacacaagttaagtacaggcttctgataattttaggatcatattatatttggactggctaaggattgtgagaatttgaatgaagagacagactcctaaaaaactttgagcccaggctggggtgtggtggctcatgcctataaccccagcactttgggaggccagggcagacagatcccctgaggtcgggagttcaagaccagcctgaccaacatggagaaacctcgtatgtattaaaaattcaaaattaacaaggtgtggtggcgcatgcctgtaatctcagctacttgagactgaggcaggagaatcacttgaacctgggaggcagaggttgcagtgagcaaaactcgtgccatttccagcccaggcaataagagagaaactccatctcaaaacaaaacaaaacaaaacaaaacaaaatgaaaacaaaaacaaacaaacaaaaacacctgtaagcctacacaagacaaaaattaattgactattacaaaaatactgtgccacatttttaaagttatatcaggcagtatggaaatgttttagatatactttgtaaatcaactctgtggtccaagtcaaatgacctatgataacctctcaggtatcagtgctgcgcacctaaatttgggaaagtaacctagtgtttaaaaagacataaacttaatgttcagtgtggactcatggagaacctaggcagccacttgatatttcctgagttctttttttaaaaattaattaattaattattattattattatttgagatggagttttgctgttgtcacccaggctgaagtacaatggcatgatcttggctcactgcaacctccacttcccaggttcaagcgattcccctgcctcagcctcccaagtagctgggatgacaggtggtcacccccacgcctgactattttttgtaattttagtagaaattgggtttcaccatgttggccaggctggtctcaaactcctgacctcgtgatcaacccccttcagcctcccaaactgctggaattacaggcgtgagccaccacattcggaccctattcctgagttcttgaagtttccattatttaaagctacgcatttcactactaatcacagaaaagataaagtaatgtacattaaatataaattgaatgtgtgtttgtgtgtgtatgtctgtgtgtgtgtgtgtgtgtgtgatgactgttctaaattactacactaggttaagaccaattcctttttcaaacttataattcttagaagaatattaaaagtttatgtatgtttctgctacctcatgtgtgatttaaacatttatacagaaactgtcttttatttttttgagacagagtctcactctgtcacccaggctggagtgccgtggcacgatctcagcttactacaaccttggcctcctgggttcaagcgaatcttctgcctcagtctccctagtagctgggactacaggcacacaccaccatgcccagctaatttttgtatttttagtagagacagggtttcaccatattggctaaggtggtcttgaactcctgacctcgtgatctgcccgccttggcctcccaaagtgctgggattacaggcatgagccacttcgtccggcttttttttttttttttttttgactgagtgtcactcttgttgcccaggctggagtgcaatggcaccatcttggctcgctgcaacctctgccttctgaattcaagcaattctcctgccgcagcctcccgagtagctaggattacaggcacccaccactactcccaggtaatttttgtgtttttagtagagatggggttttaccatgttagtcagtctggtcttgaactcctgccctcagatgatcctcacgcctcagcctcccaaagtactgggattacagatgtgagcaccagacagaaaattgcatgcctggcaattgtcatttttaatgcatgttttctggtagtataaaagctttctgatgcaagaaggttgttattatagcggtagctaaaaggatactaagactttcttttcctcatgaagacttgctgaaaaggtctccaattacaaagatacttatttcactagaaaagttgtaaaactgttaaataagatattacagatacaatagtactgagcaaagctaactaaattcactagattgtttttgtaattgcaattgatgacactcagatccacttagagtggaaaaaacgtgttgacttttataaagagtcattggaagacctatgcacctaataatagaacgtcatgtataatctgctactgaagtctaatattactaaatgtggcaaggctctaatgcattatggcaaagcatattttcacaaggtaaagaaagctttttttttttttttgatggtctcactgtcacccagggttcagttttgtgatctcagctaactgcaacctctgcctcctgggttcaagtgattctcatgcctcagcctcctgagtagctgggattacaggtgtgcatcaccacgctctactaatttttctgtttttaggctaggctggtctcatactcctggcctcaagtgatccacctgccttggcctcccaaaatgctgctattacaggcatgagccactgcatctgtccagaaaagcttttaatagtctactgactgggaacaggaaaaccttttataatttagaacaaagagactgaatctgcttgccatctacaatgtagcaagacttcgggactttaaaccttgggttcataacgttacaactcaaaggggaccctctaaactcttgtaatcttattggagattttaattggagatcttgaggtaaagctaaccggagaagtttctcctcaaaagaagatgacaaccttgaggtagaaagctgtttccacaagataaaaaatgaagacctctctgatatcatgacgctcttagttcacagtttctttttttatgcctctacacacaacagaaataaaaaagggatctcttgtgtgctctcatggggtatacttatatatgtaaataattttacagccaacatttaaaaaaacttatgtcttaataggtaaaagatgaagggccactgcgggtgagaaattgtaatgggaaatttgttgcctcataatatcagaaacagaatattgatcaactgctcttggagcaatattaagttaaagataaacttattcagaatagcataaagagcattgccaggaggccattagtcttctgagtgatcatttgttaggtctttttttcaaaggcttagagtaaataaggcaatgattagaaatttatcttccataacaggctctatagcagattccaccataaaggctatggttacacaatagaatttaatatttttttaataaagttgtgctaaataaaataatttatctagtttacttactggataaacagagaagtatctgtgcagttggtagtatttgtagttgcacatggagaaatacatcgagtattacagagattcagttgtaggaaattaatgaacagactgcttggttgaaatgagtagaccatttaactagctaactgtttgatctatttaatcttagttggttggttcatgggaaccttggttaaaaagcatacttctggtcgggtgcggtggctcacgcctgtaatcccaacactttgggaagccgaggcaggtggatcacctgaggtcagaaattcgagaccagcctggccagcatggtgaaaccctgtctcaactaacaatacaaaaattagccaggtgtagtgacacatgcctgtaaccccagctacctgggaggctgaggcaggagaatcacttgaactcaggaggcagaggttgcagtgagctgaggtcgcaccattgcactccagcctgggtgacaagagtgagacttcgtctcaaaaaaaaaaaatcgtacttctaactcttgatattattttcctgataatcaaaatatagtctccctactgcattctattctctcaaaagttataaatctttgcatgcagtcatctctagaatgtcaagtggtctctctttaactggaatgatgaaaacttgaaaatgtatttgaccatgagaacaccataacctatgaatgacctgataagaacggaaatcaaaaataatggaaactgagagtgacactaagatgctgagttttggtcacactctgacctatgtgaaaacctaatcaaaagggggacattttttaaacaaaattattggaggccatcattctggactgagcttgttcactaggctcaaacagaccaaaccaaacaaaaatagagtcattcatgttgaatgcgacatagtcaaactgaaagtttaaagaaataggtggattctaaaactggccaggtcttgtttttctttggtgaaaagcagatttcgatacaaggaggtctcctctactgtaatcattttaaaaaataataacctgaagtacttgttttcactttataaaacccacagttctgctattttacagtggaatttgagactaaataagtacatttttgatggtgacaaagtaatatcaacgcctgaagttttgtttaatttcttgaaattgaggagataaccaaaagggagatattgttaaattaattatagcctaaagctgatcgcttttatgtttaattttgttaataggattttctgtacacagtaaactaaaagctagctgaatatgtaaatagattgtaacttattcttgtaccaaccactatgtttttgccaataaaagaacatcagctggtcaaaccatattccaataaggcaaatcccaagctgtaataaatctggctgtttctgtacctcatttctattttctgtatgtcactttgcttcttctgtatataaatctttttttccacgtggctgtgctggagtctctctgaggctactcgggacccataggctgcttaaaatttgcaaattattctttgctcaattaaactatgtgaaacttaatttctctgaagtttttttcatttaaaagttttcaaatgttttgtatgataaaaagataagttatgtgttgttggactttgattatcaaaaataagttatgttttccaaattattccatatcagctatgtcagctattttttccaagttattctatgttctttcaaaatgcttttgcaatttcttttttgtttttgttttgttttgtttgagaaagagtctcactctgtcacccaggctggagtgcagtggtgtaatcaatcatggcttaatgcagcctccaccttccaggcttaaacaatcctcctaccctagacacctgagtatcatcatgcctggttaattttttaaatttgttttgtattgagacaggatcttactatgttgcccaggctgcacttgaactcctgagcttcagtgattctcccatctcagcctcgcaaagtgttaggattacagatgtgagccaccatgtgcttcagtaatttcttgagattattcccaacaataaacagtactatgtgggcacaaatctaaaagcaatctggtttctatttttgaagtgtcactctccaggattttaagagtctaggacagctacttgaatagtgtgatccatggaggtacataggctttggagtcagagttgatcctgagtcccatcccagccacgtagtagctgtgggtattcagacaatttcttgatatggaagagttctatagaccacatatgcagaaaaagcagaatgggctgggtgtggtggctcatgcttgtaatcccagcactttgggaagccgaggcgggtggatcatgaggtcaggagatggggaccatcctggccaacatggtgaaaccctgtctctattaataatacaaaaattagctgggtgtggtggtgtgggcctgtaatcccagctactcaagaggctgaggcacaagaatagcttgaacccaggaggcggaggttgcagtgagccaaaatggcatcactgcactgcagcctggcaacagtgagactccctttcaaaacaaacaaacaaacaaacaaacaaagagacaaacaacagcagaaggatactgattacaaatatggtagcaatttttcatccctcctgtattcatgtccattgccaggtgcttttacagccattcccatcaagattcagaatctattttccaaacacttgatctggctggccttttttgcttagggcagtagaaacctgggaacatgacaatgtcttattttggggcctaggttcaaatagtgttggctacttctgtttttcttttctctctttttttttttttctttttttgagaaggagtctttctctgtcaccaaggctggagtgcagtggcgtgatcttggctgactgcaacccccatctcccaggttcaagcaattctcctgactcagccccctgagtagctgggactacaggcatgtgccaccacacccagctaatttttgtatttttagtaaagacaaggtttcaccatgttggccaggctggtctcaaattcctgacctaaggtgatccaaccaccttggcctactaaagttctgggattacaagcgtgagccaccatgctgggcctgcttctgtttttctttcagaatgctgccatcttcatgaaacaagcccatattagccagctggaggataagataccatggggaggagaagcaagttgcccctgttgacagccccagaagcagaagctcacccctagaagcacagctgccttcctagtcaatgagcagctcatgatacatgtctaaagaagctcagctgagaacagaagaatggccccactgagtccagcctaaatggctgagcagttcaattatgagctaatcagttttggatggtttgttatgctgcatagctaactaatacgtgcacccagtgcagatagaatgccaagatttaatgacaggttggttactagttaccttctaatgctgagcagcataaaagtactgatatttttccctatttaaagttagatgtcttgtaagataatgttgagaaatgcagaaatgtttttttttgaaatgcagaaatattgctgggtgtggtggctcatgcttgtaatcccagtactttgggaggccaaggcgggcagatcacctgaggttgggagtttgaaaccagcctgactaacatggagagaccccctctctactaaaaatacaaaagattagctgggcgtcgtttcacatacctgtaatcctagctactcatcaggaggctgaggtaggagaatcacttgaacccaggaggtggaggttgctgtgatctgaggtcatgccattgcactccagcctgggcaacaactgcaaaactccgtctcaaaaaataaagaaaagaaaagaaatgcagaaatacatgtggacatgtatgcatgtgattggcgcttatattcactcagtttcccacaccacaggagaaaacggataaccccagcctgaccattagtgtcaaggccaaatagcaaaataagtttgcctttaatctattttcttcctagtaaatattaaaggtccagacagtgtagagatctcaagacatagagttttcttctcttgttgccccatcatcctttgttcactgtctgttctctgaaagaaaggtgggcaacagtagtaagcagtggtttacctgtggttatttcattcctgctgccctcaggtgtggtgttgattgaggtctttggctcactctttatttttattttttagtcaggtcgtttgttttattgttgtctgaaaattatttctatattttggataacaatctttatcagatatatcttttgcaaatattatcttccatactgtgtctttcttttcattctctatacagtgtctttcacagagcaaaaatgcttaattttggtaaatttgacatcaatattttactttcagaaaatgaactagtggtatattatctaaattctaattgctaaatccagggtcatctagattttctcctaattacattctaggaattttatagtgttgcattttaaatttaggtctgtgatccatttgtgttagtttttgtgaggttgtaatgtttgtgattcatgcttttgtatgtggatgtccaattgttttagcatcatttgttgaaaggattctcttggctgcattgtattgcctttagtcttttgtcaaagattcattcagtgtattaatatgggcttacctctgggctctgcattctttccatcaactgatttgtctgttcttttaccagtatcacactgtcttgattactgtagctttatatttaatcttgaagctgagtagtgtctcaatcatccaattttattattcttctacaatatcgtgttggctactctaggtcttttgcctctgcatgtaggtttttgcctctatatgtaaacttcagaatcagtttttcagtagccccaaaagaagttcatggaattttgtttaaggctgtagtgcatcacagatctagctaggaggaactgacatcttaacaatatggagtatttgcattcatgatcatggtatatctttctactctttgctccttctgatttctttcattagataaaagtattttttttttaaggacaagtgcctcactccatcccccaggctggagttcagtgatgccatcttggttcactgcaacctacacttcccaggttcaagtgatccttctccctcagcctcccaagtagctgggactacaggcatgtgccaccatgccaggctaatttttgtatttttagtagagatggtatttcaccatgtttattggtactttcaccatgttatttctccttcttcagcctcctgagtggctgggattacagctgaacctgggaggcggaggttgcaatgaggcgagatcacaccactgcactccagcctgggcaacagagtgagactctatctcaaaaacaaacaaacaaacaaacaaacaaaagtttcaatataggcataaaacatctgttaatttacattatagcacatctacttaagattagttttatttcttataacaaagaatctttgtttcaattttttttataaacaagatcttactttgtcactcaggctggaatgcagtggtgtgattatagctcactgtagcctggaattcctaaactcaggtgatcttcctgccttgggctcctgagtaggtgggagtacagttgtgtcaacatgctctattaatttcctttttttgtagagactaggtctccctatgttgcccagcctaatctcaaactcctggcctcaagtgatactcctatcatggcctcccaaagttctggaattattggcatgagccaccatgccttgcctattttctctaaaagctttttttcacacacacacaaaaaatgtactgtcttttgttggttgcatattagaatataggttatatggagtatcctactttgaagcagcccattccagagtctacgcaaagttgtccttcctgaactactttaagacaattacctcatgtgggacaagggcatgggggcgtcccccagaaaattcaactgaaaataactactgaaacaatacatacctattcccaaacagagcaagagtgtctgttgtagatggtcaacctttgcagacagtagtagcatctatgtttaccaagagacatactgtgaactctgagaacaggttacaatgtttattgagtcaggagaaactcatccatcagaccatagccaaagacaatcaaatattaaacctcttccctgcacatgtgaaaacatcagatgtgcaaaaataaaacattgggagacaaggtcctcactgcatatatgtgggctttagtctccagtgagacacattgagtgcacatcaatttcactactgctgcatctgtcatacactacatttcatatatatttcatactatttttgaattttatattccatttgtctctaaatcagttcataaattaaaactacattatttaacttttcaattccttataacacatgacagaagatgtcacttcatatttctttctttctttttttatttttatttttttgaggcagagtttttgctctttttgtccaggctggagtgcaatggcgtgatcacagctcactgcaacctccacctcccgggttcaagtgattctcctacctctgcctcgcaagtagctgggattacaggcatgcaccaccatgcccagctaatgttttgtatttttagtagaggtgggatttcaccatgttggtcagctggtatccacctccagaccttaggtgatccacccacctcggcttctcaaagtgctggaattacaggtgtgagcctttatactttttacatatatctttattcatttattcttctttgcagtaaaatttctattttcagaacacaataagacggtgtctctgttggattcaactcaatttttaaactgattaaaagatcattgacccaattctgttgaatcttccttttcaaacatgtattgccactaacttttacttgtacagatctgttattcatgtttttcagaaatactttctgctaaatccttactaattttttaaaaatataatgttctaggccaggcacagtggctcacacctataatcccagcactttaggaggccgaggtaggcgaattacgaggtcaggagtttgagacaagcctggccaatatggtgaaaccccatatcaaccaaaaatacaaaaattagctgggtgtggtggcacaaacctgtagtcccagctactcgggaggctgaggcagaattgttgcttgaacctgggaggcagaggtttcaatgagccaagatcgcaccactgcactccagcctgggcaacagagcgagactctatctaaaaaaaaaaaaaaaaaaaaaaaaaaatatatatatatatatatatatgtacaaatatatatataaatttttctgtagaattctggtaatgtctttatttatagctatgaacatgaaacatgacattctattggtttaaattatttaactaatttgttagtggatttccaaatgctaaatctgacttgcatttctagcataaaataccctggatcataatataattatatgttttagtatgctgacacaatggcttccaatatttaaaatttttacattatatttatatgttctatatgactgtaatattctatatgtgtttgtttaagcaaagttctcatatccctcttatgaacacttacacataagtagtgggaagattgcctacattaaaactcttgaacagtctagatagcaacagtttatcaactatttaataagtagaatttctctctcaagtatataatgttggtgtttttctatatgagaataaccctttgagatatgtctctgtttcttctgtaaatattgaacattttacaatctctaactctgtgaggataaatgctgataacatttattcctaaaataaatcaacatttgcatgttagtttacattaaattgcacatatttgccccatttatgtttatatcaatatttaatttcaaggtttttttttgcactgtaacctttcacatattctactcaaggtttttttttttttttttcctttgaggtggagtttcgctcttgttacccaggctggagtgcaatggcgtgatctccgctcactgcaacctccgcctcccgtgttcaagtgattatcctgcctcagcctcccaagtaactgggattacaggcatgcaccgccacacccggctaattttttgtgtttttagtagagacagggtttctccatgttggtcaagatgttctcgaactcccaacctcaggtgatttcgcccgcatatgcctcccaaagtgctgggattacaagcgtgagccaccgcccccggcctcaagcttttcatatgctcacatttcctgattaaatatgaaagaatagtttgggccgggcgcggtggctcaagcctgtaatcccagcactttgggaggccgaggtgggcggatcacgaggtcaggagatcgagaccatcctggctaacacggtgaaaccctgtctctactaaaaatatacaaaattagcctggcgtggtggtgggcgcctgtagtcccagctacttgggagactgaggcaggagaatggcgtgaacccaggaggcggagcttgcagtgagccgagatcacgccactgcactccagcctgggcgacagagtgagactccgtctcaaaaaaaaaaaaaagaatagttttgctcaggaatttgaagattcacagaaaatttgctttttagcagaggaacacctaaaggaagcgcagaacccagaaagacacgctgacttcactgtctgttcttcgtatatcacactcagcattttcctctccctccatgtgagcctctttctttcttcagaaatcatagatgagaaaagcctgttccaaattccttcatttctctggggacaatagacagctgtaatcatttttcttgtttgtttttttctgttttgagaaggagtcccactctgtcacctaggctggagttcagtggcatgattttggatcattgcaacctccacctcccaggtcgaagctattttcctgcctccgcctcccaagtagctgggattacaggcgcgcaccaccacacctgactaatttttgtgttttcagtagagacggtgttttgccatcttggccaggctggtctcaaactcctgacctcaggtgatccgcctgcttcaacttcccaaagtgctgaaattacaggaaggagccaccacacctggcaaagagctgtaattgctgttggtaagttgtaactggagcgaatttttcaaaatattgctattttttttccaagtgcaacagctcatttcactttatttagctatgaataattgcgatctatccatactgacttaaaacacacaagttattatttttttttcacataaaaagtcaggagttaggcatacctggggtggtatggcagcttcaggaagcctttagggatgtctctgctccatcacccctgacatttgttttccattcttcatggtccaagatgagggctgaagatccagaacatctattaacatccatattttagaaaagcaagaaagctgtttttaaaatcatcgttgtttcatctacttaatttctgaatcttattttatttgtgcttttttcttccaacttctattttaggttcaagggtgcatgtgcaggtttgtgaaatgggtaaattgcatgtctctggggtttggtgtacacattatttcaccagccagatagtgaacatggtacttgataagttgtttgtttgtttgtttgtttgtttgtttgttttagagggagttttgctcttgctgcccaggcttgggtgcagttgcgtgatcttggctcattacaacctccgcctccaggttcaagtgattctcctgccatagcctcctgagtagctgggattacaggtgcatgccaccatgcctggctaatttttgtatttttaatagaaaccaggtttcaccatattgaccaggatagtcttgccctcctgaccttatgatccgtccaccccagcctcccaaagtgctgggattacaggagtgagccaccgtgcctggcccaatttttgtatttttagtagagacaagggtttagcatggtggcaaggctggtcttgaactcctgacctcaggtgatccacccgcctcagcttcccaaagtgctgggattacaggtgtgagctgccgtgcctggcagataggtagattttttatcctcaccctcctcacaccctctactctcaagtagaccctggtgtttattgttttcctctttgaattcatgtgtactcaatgtttagcttcaatttataagtgagaacatgcagtattttgttttctgttcctgcattaatttgcttataataatggcctccagctgtatccatgttgctgcaaagcacgtaattttattctgttttatggctgactcgtattccatggtgtacatgtgcctcatttttctcattcagtccactgttgatgggcacctagattgattacgtatctttgctattgtcaaaagtgctacaatgaacatatgtgtgcatgtgtctttatagtagaatgatttatatccctttggtatatatctggtaatagtgtagcaggatgagtcgcagacaaaactcctcagacgccagattaaagaaggaagaggttttttattcggccgggatcattggcagactcgtgtcttaagagccgagctccccgaaaaagaaattcttagcccttttaagggcttacaactctaaggggtctacatgaaaaagtcataatagatcaagtaagcgtgagaaacatgactgggggctacatacatcagctaacagaacaaaaagttttacagtattttctcatacagtgtctggaatttacagataacaccaatagttttggtcaggggttaataatattattattattttagccaccagggccaggtggtggtgccaaggtcgtctagctatttatcttacttctgtttcttttcaactttttgctttctcccttttctcctgtcttataaactagggaaaaggggaggttggggagaaactgagaaggacaacaggagaagtggcgacctcataccatatttccccccctttgagaattttcacttttagtgggagttcttactctcgtcctcacttttttagtctctttgtgagatagagcgatagtgatttgtataatacacatgtgctgaagttttctgatgaactaaagtaacaacaaaatattttatcatttgaaaaagcaagggtaatacacaggggagcagcaagcaagttcctatcactagcaatacacctacaatgagggttttaaatcctcctatagctggaaaccattttccaaataaagactcaggattaaacttgtgccaaacctgtacaggcacatgtgccacctttgtcatgtccctgactatgttttcaaccacctgtccttgatcatctatttgtaggcagtaattggttaagttaaattttccacaaactcctccttcagctgctagcaagtagtccaaggccagtctattctgatagatagcattcctcgtttgggtttcctgccgagctaaaacagtcaaagctctgccagtttcattagtaattatttctaagatggcctgcaaccgtatgatccgattgagcatgtaaatgggggttcggtatccccatgagccgtcttgtgcccatgtggcaggcccataatactgtatgatcctttcagggcgccactcattatctttccagtttcctataactatgcctctcttttctcgggaggcatagacagggaaacctagggtctcacctgtttttatgggtaataagaaaaaggacgacttaatagtgccaataacacaactgcctgcctatttattaggtaaccgaatgtaggctctgtgcccacatatccagtatagtccagcgggagccatccagtcctgatgagattctggatgagcccaagcagtttttaattttgaaaatttactaaatggattcttttcagtgtggtttatgccccaccaagtaattgtctttgttgtactgttatacaacttctgtcctatacaattaagctttcctacagggatgataaagtctttcccttctctagctatacagtattgtccaataattgaggtttttaggacccagaagttgctagcttgggttttctgaactggaattatatcaggagctggatcagtaggcaccaactctcgggcttcccaaggccatcggtctccgatagtggttcccccgcatacataacaagaagtaacattaagggaatgagctacattttctgctaattggagaaacaaattttttgtcttttttggaaattctggtgctggcagattcagctccttataaaaggtttgaaatactggtttgggagagcacttgtggacctcccctctaattaaaatggcaacttgggggtttaaccctgtcccatcaatccccagggttacacgttctccctttttccaatggggatctaggggattggtaattattagttctagtgggttacagtgaccagcagcacaggaggggttggcttcccccttctgaagataaaccgggtcctttttgttctttttccaagtagcccaaataacacatggccaataggcacaattttcacaaacccctgactcatgacaaacatatttattttttattctgtagctcctttcccagttaagagaatcacatcctattcctagctttttactattaatggctgcacaagcatcaaatcttaaagttatttgtttggggatttctttttcttctgttctagttattattttacttgtatcacctaggaaaaggccagttcttattcttatttcaaaaatggtggttgcaggaggctcagatgggttataacacacatcaggtcggtcatttcctgggctacatacattgtactgagtagcattatacaaacaagtttcttttaatgttcctatacatttataataactatagaacagaaacattgttttaatttgctgtcctacctcggtgacctgatgaatacactgggaacagtccccagtttgagtaagatcagttgaagcccttactgtataagtccaaaatttaagaaaaatgaatcccatgatgagcttctgcatgcttcggccgtgcgtggaccagtcagcttccgggtgtgactggagcagggcttgttgtcttcttcggggtcactctgcaggggttttctgggcttggtcttgcctcccaggtttcaggcactgcaggttttacacggctgtggtggatccaggttgggattccctctaccttcacagcggtgggagtgctcaggatgacagtctggggtcctttccaccgtggacacaaacaggctacgtttcagtccttgatccacactagatcacctggggagaaagggtgaactggggagaataagttaacagggcatctctcatttacccaggccgagattgtttgtgtaatttttcctgaagcctgtagctatcgctgtaactcaatttcacctaactctcggggagtgcctggaagtccccgcaatataggagggggcctatgatataatatttcataaggggaatatcctgttcttttagaaggggtacatctaattttaaataataccataggaagagcctgtatccattttaatcctgtttcttgacatactttccctaaactatttttgatagtccgattcatccgctctacctttccggaactctgaggctggtaggcagcatgcagtttccatgtgatccccaatacctttgccgtcttctgtaccaagtcagccacaaacaccagcccattatctgagccaatccgtaagggcagtccaaatctaggaataagatctcgaagaagcacacgagttacttcatgagctttctcagttcgtgttggataagcctccacctgcccagagtaggtacacacaagaactagtaaatacttgttacctccacactttggcatctctgtgaagtccacctggagatcttcaaagggggctgctccataagcttgtatgccagggggaacagctggaccttgtctcgcattatgctgtcggcaggtaacacaccgctgcgtcactgttttggcaagggctgacaaatgcgagatgtagaaataccagcctaacaacttttcaagtgattcctgacctagatgggtggttttatgcacagccagtacaactgcagctcctagcagctgtggcacagctactctcccatctggtaaccaaatccatccttcctccatcacttgtcctccctctgcctggagaaagtccttttcttctttagaataagtaggtacaagatcaggtgcttgagggagcaggggggctgtcactgatgcccggaagggggcagatgctgctttttgagcctctaagtcagtgcaggaattccccaaacccaccaaggtggaagctcactggtgtcctccgcaatgtataacagccaccttgtggggtttccatactgcttctaataattgcaagatttcttgttgatattttatgtcttttcccccagagttcaataggcccttttctttacataatgctccatgcacttgaagggttaaaaagacatatcaagagtcagtgtaaatgtttacagtcttaccttcactgagttctaaggcccgaattaaagcaatgagttcagctttctgagttgaagtgccctggggaaacgatctggcttcagcaacagtgtccagagttaccaccgcataccctgcacatctctcttcttgtgggttgacaaagctgctcccatccacgtatagttcccagtctactgatgcccagagtaaactgagtccaacacttctacacagtcatgctcgacagggatctctaatactgggagcaaggtagcggggttcagggtgttacaaacttcaatggttatatggggattttcacaaagcaaactttggtacttagtaagtctagcattcgttagccaatgatgtcctctagtattcattaaagtcaccacagcatgggggtcctttatgttcaggttttgcccaagaatcagcttatctgcttcttgtactagcagggcagttgctgccaaggccctcaaacacgggggccatcctttagaaaccccgtctagttgtttagagaggtaggccaccggcctcagccagggccccacagtttgggttaaaactccaactgccatcttttcactctctgacacatacaatgtaaaaggctttgtcagatcaggtagccccagggctgggactgacataagtctttcctttaactcatgaaaggcttgctgttgctgggatccccattcaaaaggttcctggtcccccgcctttgtgacctcatacaaaggcttagctaatactgcaaagtttgggatccacagtctgcaaaaacccacagcccctaagaattctctcacctgccttctggtcttaggctccggtagattacaaatgacctgctttctttctgatcccaggctgtgctccccctgttggatagtaaatcccaagtaacatacctgctgtcggcagatctgagctttttttcttggacaccttatacccacagtcctccaggtgccggagtagagcatctgttcccttggcgcacccgactgccgtggggtgtcccagcaaaaggtcatcaacgtactggagcaacacgcagcctaggtctctggtgggaaacttctggaggtctcgagccaacgcctccccaaagatggtgggggagttcttgaacctttggggaagctgggtccaagtgtattgagtagtgacacctgactctggatcttcccactgaaaggcaaacagcttctgtctctcaggggctaatctgatgctaaagaaagcatctttcaggtccaagcaggtgaaccagctgtcctcagctggcagcaaccccagcaatgtgtacaggttaggtactgttggatgtaaagtcactgtagcctgattaaccaagcgcaaatcctgtaccggcctgtagtccttggtcccaggcttgggaacaggcaggaggggagtgttccatggagactgacaaggaactataattctaaaggttcttaggcacttgagatggacctggataccttcaagagcttctctgaggaccgggtactgtttttgcctaaccggctggaccccaggcttaacttctataagcacgggggcttggttgactgccaaccctggagggttgtcttccgcccacactcttggccaccgcttagccagagctggtcttatctcttggcccggctcagttaagaaaagtctccattcctcctctcgggggagcataagggtcataatgactcctgttccgggtaactttagcagcaaagagccgtgctctgtaaaagagatagtggctctcagtttgctaagcaagtctcttcccaacaagggcaagggacaatcaggcatgtacaaaaactgatgaatcactttatgtcctcctatagtacaagtctggggcaagcagaaagcttgttttgctgaaactcccatggctccgatgatgtcaatagtctttttggataagggggcgactgaggcagttactaccgaatgttcagcactggtatctacaagaaaatcaatgtctttacccccaactgtcatcctgaccataggctctttggaggtccttgagcccagtccccctcagtccaataacccttctgccaggttgagcagggccccttcctccttgtctggagcctcctgctccgagtcaccttgttttccttttagctgagggcatttgttcttccaatatcctatttctttacgataagcacactgattacactgcaagctctgacagccaggctgagtttctttcccagggccccccttttcccttgcctctttggggggacccctctaattgctgcagctaacaggtcggcgtttcgccgggcctgacgttcattctctatgtggttttccttacggcttgctgcatccctgtttacaaacacctggttggctatttctaataactgtgatgtgttcatccctgcaaacccagcctttttctgcagttttcttctaatgtcttctgtgctttgactaactaaagccatgttaatcatgcgttgattttcagggctatcgggatcaaagggagtatacatacaataagcctcacacagtctctcgtagaattttgctggactttcttcttttccctgaatgacctcagagaccttgttaatgtttgtggccttctgggctctcctctttaatccttctaagagagctttcctgtatcggtttagcctttgcatatcctctctttaatttgggtcccactgggggtcggttcctggtaactgtgtccttacatactcttgggggttttggtaatcagccagtgcatgttcctctagccacttagttgctgcttgaagcacccttcacctttcatctgttttaaagaggaacatgagcaactggtggcaatcagcccaagtggggttatgggtctggataatagtttggagcaaatcaattagagcttgcggcttttcagtataggacggggtattgtttttccagttgagaaggtcggcagaggtgaagggctggtacacaaaaacacgactctccaccatgtgcccatcctcatctattccagtatactgctgctctctcaggggcatttgtatccctgttttgggtcttaaatgagctgccaagggaggggtttctcccgaggcttcacctcctctcttgtctactctgagtggcctagggatacatttgtctggcagaggcgcaagcactgtggactcaaaagtggggagcctctctccctgataaggggagggcaacactgggatcactggtgccatctcctgcaatggatcttctgatgtttggtcgaacagaacttcaggagttgatttccctcagcgggtggagcagaatccttccttgactatctgtccctttgctactagcactgctgctgcctgccctcttagccactgtggggggtctagcaccagctgtaaccaagtgtctatgtatggaaactggtctgagtgtcctgacttactagttaccttgtgccataccttagaaacaagggacctgtccaggcttccttctgatggccaacccacttctaatgttggccaatctatttcacacaaagttctaagtttccctggtgtcatagtaaccccatagtctccattaaatcccttcttaaaatttttcaacatagttcctagaggagtaggcttattttgtgtctgatccatgtttcctcaagacaaaacaccaagctcacaccacatgcacaccacaaaacaaagaatgggtaaaaagtgcacacacacactttttcagttttcaccaaaccagaatcaaaaccaaaatcagagtatccagaaatccaagccaggtcaaaccaaaaccaaagtatcaagcaattcaagtcaagtcaaaaacaaaaaccaaagtgccagtacaggcatgccgtggttgatcaggccacgcttccactcaaatggagtgggcaagttccgaagaccagtcttaccaagtttcaaatgtctggactccaagtgcctgttccttcccagtgttcagccactgcattgatcctccacaggggcctgccacgcactgctctgacgaggctttccaccggggtaattgcctacctgggagcgctctcaggatccgcgtcactcaagctggccagagtcccctgcagggatgctccacagggcaggcctaagccacctaaggggctgcctcgactgtccttcaattaccttgcttcctggccagggaaccaagaaatgtagcaggacgagtcacagacaaaactcctcagacaccagattaaagaaggaagaggttttttatttggccgggagcattggcagactcgtatcttaagagccgagctccccaaaaaagaaattcctagcccttttaagggcttacaactctaaggggtctacatgaaaaagtcataataggtcaagtaagcgtgagaaacatgactgggggctacctacatcagctaacagaataaaaagttttacagtactttctcatacaatatctggaatttacagataacaccaacagttttggtcaggggttaataatattatattttagccaccagggccaggtggtggtgccaaggtcatctagctatttatcttacttctgtttcttttcaactttttgctttctcccttttctcctgtcttataaactggggaaaaggggaggttggggaggaactgagaaggacaacaggagaagtggtgacctcataccatatttcgatggctgtgtcaaacagtttaaagttatttgagaaatcttcacactgctctttccacagtggctgaactaacttacactccctttgctctgcatcctcaccaatacaatactgtggtttttatttgcatttctctaataattagcaacgtttacatttttttaatgtgctcttttgctgtgtgtatgtcttcttttgagaagtgtctggtttttgtttttgttttgagatggagtcttgttctgtcacccaaactagcgtgcagtggcaggatctcagcttactgcaacctctacctcctgggcttaagcaattctcctgcctcagtctcccaagtagctggattacaggcgcccaccactgtgcctggctaatttttgtatttttagtagagatggagtttcaccatgttggccaggctggtctcaaactcctgacctcatgatccacctacctcggcctcccaaagtgctaggattacaggcatgagccactgtgcctggctgagaagtgtctatgtctttgctcattctttgattggattgtttatattttgcttgttgatttatttatgattctttatagattctggatattagatctttttcagatgcatagtttgcaaatattttctctcattctgcaggttgtctgtttactttattgatagtttctttcactgtgtagaagctcttaagtttaattaggtcctgcttgtcagtttctgtatttgttgcaattgctttgggagtcatcatcatgaaatctttgtcaagacctatgtgcggaatggtatttcctaggttttcttcaagggattttacagttttagattttatatttaagtctccaatcaatgttaggttgattttgtacatggcgagagagagaggtccagtttcaaacttctgcatatggctagtccattatctcagcaccatttattgaataagaagttctttccccattgattgttattgtcaactttgtcaaagatcagatagttataaatgggtggttttatatctgggttctctaacctggtccattggtctctgtgtctgatttcttacccgtaccacgttatttagattattgcagcctgtaatgtagtttgaagttgggaagtgtgatgcctccaggtttgttctttctgcttaagattatttcagctatttagactctgttgattttatgtaaattttagaatgaattctggggataatattatttgtagtttgataggaatagccttgaatctgtacattattttggacagtatagcctttttaacaatattgattctttttattcatgagcatggaatgttttccattactttgtgctttctctgatttctttcagcattgttttgtgattctaattgcagagatctttcatccccctgacataattttatttgatattttgcattcacaaatactaattttctctatataattatgataattcagtttctctatgcaatattttacaaattttacattctactcatgtttcccttttcttttctctttttttctttgagatggagtctagccctggtgccaggctagagtgccattctcctgcctcagcctcctgagtagctgggactacaggcatgcaccaccatgcccagctaatttttgtatttttagtagagacggggtttcaccatgttggccaaaattgtctcaatctcttgaccccgtgatctgcctacctcagcctcccaaagtgctgggattacaggccatggtgcctggcctcaagcctcttttcttaataggcattccattatgtgctccttcttggttaagttgaaaaaggcttctgttttaattccaagaggaaaccatttttgcatttgataaattccacttattttaagatgatgctaaatcagaacgtttatattctccttgaatctttgaatcattatagataatatttgccaataaattatgcaatcctatttaaattttaaattttcatattgcaatattaaataaatacgtacaaacattctttaaacaactaacaagagatacaaaaatgtttttaaaatatgtggattttttaaaaaatatatctgatgttgagacagcatgatagttaaaagcatcttcaactcctgaaactgcctcctacaaggaggtgattttagaaatgtcatttatcctattttcatctaagccctcttcataggtaaaatcagaataataaaccacttcatagagttgttgtaaaaattgtatgtaacacattaatataacacattaatatagtagttttataatgctatatctataaggttatcacactatatatagttataataataaagaaaagccaatggcattttcatattaaaggtttttccaagaaaagccagtgagatctttcatattaaagttttatatttgattcaagtgtatttcaatgaaataatataggtgaaaattaaattactaaaatagaaaatgcctgacaacatgtgagctagatatcaaccactggaatttattttgaaaagcacaagcctaatgcaaataatttataaatatatatatgtgtgtttatgtgtgtgtgtgtgtatatatacacatatatatatagagagagaatagaaaaaatcttagtgaaagaaaagtggaatttaaaaacaaagttttaagttggaaacaatggtatgtgaacaatagcccatttcagttgccacaataaaacagaccttatgtgtcaatgcaggatattctcactctgaatgaaaatattagtaattggaaaataatgaaaggcctccaggaatttggaaataggaatgatcttcttttctcagacaacagttggattattgaggaattttttttttgccactttgttataccgggtggatattaaagtccacagatttgattctcaagcacctggctatagccaacatcttggtcatattctccaaagcagcttcacagacaatgacttcttttaatttcaagcatttcctcagtgatattgcatgcaaacatgttttctatgttcacagagtgggcagaggtgtgtgctttgccaccacctccctcttgagtatcttccagccatcattgtcagccccatgaactccaggtgggcacagttgaaactacaaacccccaaatatattgggtcccccaacatcttgtcctggattggaaatacactgataaataccattttttctatgcatgtgattggcaaatcgaacagcaaaaacaattcaaagaaaaaagatttaagatactgttcttcattagataataacagaattaccagcttactgtgcacaacattatcatattgcatggtgtttgtgtgttagatacagttaggttcactcttcaaatagcttatccagtttccccattctctattctataattccaagtattccttacctcaactgtgcaccaacttacctaactatgcctagacatgaatgaaattgttgcaacccaagtcccagtctgcattattttcctttttagagaataggttgctttcctagttcccacataatggaccccattctctctctcttaactcccttatgtgactaacttatctaaaaaatttgaagtatttagccagttgggactagttgagactgtgcggtccaaccctaaccgatagaggaaagacacagaagtagaagctgcattagagataatagaaactcgcacttcctttgttttgtgtgcccttgccattgcttaatttacgaggtgcacccttttatagaagtaaatttgccttgctgagtgctatttcttgtggagcaccgaaaatctgtttgtaacatgtgtttgagactcataatctggaccagtggctccaagatttttattctgtacaagtggccaatgagcacatgaaaagatgcacaacatctttattcactagaaagatgtaagtcaaaaccacagtgatatatcacttcatacctatgggtacaggtatatttcagaagacagatcagtgtgggtgaagatgtggaaaaattgaaaccctcatagagtgcaaaattaggcagcagttttggaaaacactttggcagttcttcctgaggttaacatagagttactacatgtcttagcaattccacttctgagtatatactcaactgaaatcaaaataggtccacacaaaaacatgtatatgcgtgtccatagaaacattatttgttatggccaaaaggtgagagcagtgcaaatagtccatggaggactagatagacaaatgtgatgtagtatacaaggcaatagtattccgccagaaaaaggaatgatgtgccaatatgggacacaacatggatacatattaaagacattatgcttgatggaaaaagctatccaaaaagggtcatgtactttatgaatccatttgtataaaattcccaaaataggcaaatcctttgaaacagaaagtggattaatggttgccagaggctgctagggaaaatagaaagtggctgaatgatgggtgtggagatttttttttgttaattatacagttctaaaattacacagtggtaatgattgtaaagcattgcaaatacacaaaaagatactgaagtgtaaacctgaaaataattaatatattgaatttgatgttatgtgaattttatctcgataaacataattttataaacaaacttcaagccactgttgccaatgataaagactagataatatgctctaaatgcagcagaaaaacactgaaacactaagttagctgaaaggaaaattgaaactaaaatgaaaacagagtccacaaagttctactgaagctttagtcacctagatattcaaataaaaacacccaggttcaactgtgtaaccctctgtcatagaagtctgggtgcttttggtagataaatccattgggcatatcagtgtgacataaaaagtgcttaaaacgtagtttttttaaaaaattataaattcgtgacactcataaagataggaacacatattaaaatatttatttaacatctgaggaatcagccgatatgataaccagtgcaaaaaagagtcaaatggccaggctcacacctgtaatcacaaaactttcagaggcccaagtgggcagatcacgagatcaggagttcaagaccaccctgaccaatatggtgaaacctggtctctactaaaattacaaaaattagctgagcatggtggctgtaatcccagctactcaggagactgagcctgtaatcccagctactcacgcctgtaatcccagctactcaggagactgagccaggagaatctcttgaagtcaggatgcagaggttggactgagctgaactcatgccacgtcactccagcctgggcgacagagtgacactctgtctaaaaacaaaacaaacaaacaaagcaaaaaaatagccaggcacggtggctcatgcctgtaatgtcagcactttgtgaggccgaggccggtggattacctgaggttcagagttcaagaccagcctacccagctacttaggcggctgaggcaggagaatcatttggacctgggaggcggatgttgtggtgagccgagatcgtgcaattgcactccagcctgggcaacaagagcaaaactcggtctcaaaaaaaaaaaaaaaaaaaaaaaagaggccaggagcggtggctcatgcctctaatccaaacacttgggaggctgaggcgggcagatcaccaggtcaggatatcaagaccagcctggccaacatggtgaaaccccatctatactgaaaatacaaaaacattagctgggcgtggctgcgcacgcctgtagtcccagctgctcgagaggcttaggcgggagaattggtagaacctggcaggtggagcgtgcagtgagccaagatagcgccactgcactccagcctgggtgacagagagagacttcttctcaaaaaaaaaaaaaaagaaaaaaaatgcagattcaccttcttagcaagagcagagctgcagttctccatgatatgtttggacacctcttgtgggagatctgctgtgcccagtgcctggactcttccatgcttatgtttcttgctgccactcttgagtacctgatgccccatatcctggagctggtgaccaatgaagctcataatagccacagaaggtacagttatattatcatctatattacatatgattatctatgtgtgtattatatatatacatatattctatatattatataaaatgtatatatatgttttggacaaagacatattcaaacaatagttaatagtttttaaatattcagaatcaaaattatttataaatatattttattacaaacacaattattcatcttattcttagccaaaacacctgatctgtctaataagcacatatttcacagagctacatagagttatcaatggctaaatacattttatagggaaaagtatactctatagaaattctgccttaattgaagaactcaaagccccaaatgttataaacacttttatggctgcattaagttaaaaataagtgttccatcaagtgttgggtcaatctaactcctttctcctgagtatcaacatttgaagttttcacctattcaccaaagactcaaaggccaccctctggtatctctggccttttcatagacagatggtaagaagctgcccagctcatttcaagttcaaggtcagatggtttcttctagaagttccagtttactgtgtaccagccatgtgattctgtatattcatttattctctctaagcagccgtctccatctgtgtaaaatcaggatgatgaatttctctatctttgggttatcccaaataagaagtcaatttgagcttaagtttaagcttaatgcaatgcttggcaccacaaggcatgacacaggatgctaaactgggcacctgtattttacaaaactagaaaactttgagtttcttccctctcctgcattttcacatgtatttggtttaatctctaaatctgttgaagttgaatagatgtgtagacagggattgagattaataatctcatttacaaaaacataaaaaagaatgaaatacgtagaaataaatttattgaaagaggtaaaagatctatacactaaaaactctaaaacattaaataaattgaaggaactaaaaaattgaaagatacaccatgcttatgaattgaaagaattaatattgtaaaaatgtccatactacccaaagtgatctacagattaaatgcaatccttataaaaattccaattatatttttctcagaatttaaaaagtaattatcaaatctctatcaattcatgaaagacccagaatagcctaagcaatattgaggaaaaacaacaaagctggaggcatcatactacctggtttctgaatatattacaaagctacagtaaggccaggtgcagtggctcacacctgtgatcccagcactttgggaggccaaggtgggttgcttgagtccaggagttctagaccagccttggcaccatagcaaaacaccatctctacaaaaaatagaaaaattagcagagtttaatggcacaaacccatagtctcagctacttgagatgcggaggtgagaggattcctagatcctgtgaagttgaggctgcagtgagccacgatgaagcaactgcactccaccctgggcaacagactgaaacctgtctcaaaaaaaagctacagtaagcaaatagcatggtactggataaaaataaacacacacaaatgaagcataataccaagtcaagaaataaatgtatctacttcatttctggtaatgaaggaacaatgttttcaccagcaggcttcacctttcagtgttctatcaatgaatatttatcggtagattatttttaatctaacttcaagcattctgtagcaggccagatgagggcagatcagatgaatgttaacatgaaaattttgtggatttatagttaatgagtaatcatttatgaaagacttaccctatatttctgcagttgaattatttgcagttggtctagtggtgagcacagtcaataagaaacagataaataaataaataaatgtataataagaaactaaatcagtagcctgaagaaaaagtagagttctatttgaaacaataaagaaagagagagaatgcttactgatcttttttttaaaatctgtgatggtcaatcaatatttctctctcagaaggcaaaaaaaaaaaaaaaaggtagccaggagacaggattaatttgtatctcctgcttggatggacagaacagcatgtggagactctcatcatgaacttttactccaagaactaccataggaacataccaggaaaaccaaaagaatgcacagactctttgaaagaagtggcttgccactgcaacctctgcgagacaactgaaaaacagcaagtgccaaaagtgtaagagaaggaacattcacctctaaacacacatactcaaaacctgaaaatccagattaccagagaaggatttagccttacctagggccgaaatgaatttagagagccaagcaaaatataaaagcagaagcagtgggaagagccccataggcactcttgatcctcagggaagccatttctgactttatctcacaggggtccttgggaagggctgccagtggaattggggaagggctacagggagaagaaaacttccagctaaaccctgtaagaattttgacctagtgtcaatgttccttggcagaatcgatgaggggacagtgaatgagaagcacagatacgggcacaaaagccatggcaggtggtgaggggtggcgcctgaaagcccaggttgctttctcaatggggaggcttatagcctggggcaagatctcagtactgctcacggactggatataaacttggtgctgtttgtggggtagggtgtgaatgaaactggccttgctggcttcatgggagctgagtgaggcctgtcactgctggctttccttcacttccatcctgacctgtatgatacagcagaggcagccataatccccctgggaacataactccattggcctgagatccatactcccaaccccacagcagctgcagcaagccccacccaaggagggtctgagctcagacaggtctaaccttgtcctcgcctgatgcccttactctacccatgctggtagctgaagacaaaaaacatactctcttgggagctctatgttcccacccattgcctgagaaacctgaatacttatccaggtgacccaatggcaagcttgcctacaccctatactaccacaactgatgccgtattgaaaatcccacctctaggttggaggccaaccaactcaagccattacatcaactcatcaaagaaccccaaccaggtggtgtggctcacacctgtaatcccagcattttgggaggctgagatgggtggatcacctgaggtcaggagttccagacccccctgaccaacatagagaaaccacatccagtttctactaaaaatacaaaattagacaggcttggtggtgcatgcctgtaatcccagctacctgggaggctgaggcaggagaatcccttgaacctgggaggcagagattgcggggagccaagatcgcatgattgcactccagcctgggcaacaagagcataactccatctcaaaaaaaaaaaaaaaaaaaaagaacaacctcactccaataaaggagaaaacaacagctaattccatcacctgtaacatcctggctaaccagaagtcctcagtctttcatgtgacaacttcactgctagaacaaccagcatccaaaaaaagaaaaaaaaaaaccagtgcactaaacagaactacaaccaaccaccctcacagagtccactttactcccctgctacctctaccagagcaggtggtagaatccatggctgagaaacctgaagacagatcacatcacaggactctttgcagacactccccagtaccagcccagagcccagtagctccactgggtggttaaacccagaagatcaataacaattcctggctctcaggaagccccatcccaagggaaaaggggagactatcatgtcaagggatcaccccatgaaacaaaataatctgaacagcagcctagagcctcagctctttcctctgacatagaaaacccaaatgagaaggaaccaaaaaaacaattttggtaacataacaaaggaaaaattttttaacaccttggaaagaccacactagctccctagcaatggatgcaaaccaagaagaaatctctgaattgcagaaaaaagaattcataaggtccattattaagccacttaaagaggcactggagaaagataaatactaactgaaagaattttttttttaaaatacaggatatgggtgaaaaaaattaccagagaaatagatagcataaataaaaaaaaatcacaacttctggaaatgaaaggcacacttagagaaatgcaaaacatagtagaaaattacaaaaatagatccaaacaagtaaaagaaagaacttcagagctcaaagacaaggcttttgaattaacccaatctaatgaagacaaaaaagaatttaaaaaatgaaccaaacctccaagaagcttggaattatgtaaaaaaccaaacctaagaataattggtgtccccagggaagaagtgaaatctaaaagtttggaaaacttatttgaggaaataactgagaaaaactttcctggccttactagagatctagacatccaaatacaagaagttcaaagaactccaaggaaattcatcacaagaagatcatcacctaggcacacagtcatcaggttatctgaagtcaatatacaggaaagatttttaagagctgtgagaaaaaagcatcaggtaacctataaagaaaaacatatcagattaccagcagatttctcaacagaatccctacaagctagaagggattggggtcctatgtttagcctccttaaacaagacaagcatcagcccaaattttgtattcagtgaaaataagcttcataaatgaagaaagatacggtcttttccagacaaacaaatgcttagagaattcaccactaccaagccaccactgtaagaactgctaaaaagtgttctaaatcttgaaacaaaacctcaaaatacactgaaatagaacctccttaaggcataaatctcacaaggcctataaaacaataacacaatataagaggtattcaggaaactactggcacaatgaatagaacagtccttcacacctcaatactaatgttgaatgtaaatggcctaaatgctccacttaaaacatacacaatagcagaatagataagagtttaccaataaaatatctgctgtcttccagagactcacccaacacataaggactaacataaacttaaggtaaaggattggaaaaagatattccatgtaaacgtaccctgataccctgaaagcaagcagtagtagccattcttacatcagacaaacaagctttaaagcaaaaacaggtaaaaaataaaaaacacaaagagggacattatataatgataaaaaaggactagtccaataggaaaatatcataatcctaaatatatatgcacctaacattggagctcccaaattcatgaaacaattactactagatctaagaaaagggataaatggcaacacaataataatggggaacttcaatactctactgacagcactagacaagtcatcaagacaaagtcaacaataacaacaaaaaagggaatggacttaaactataacctagaacaaatggacttgacaaatatttacagaacattccacacaacaactgcagaatatacattttattcatcagcacatggaacattctccaagatagacacatgataggtcacaaaacaagtcgcaataaatttaagacaatcaaaattatatcaactactctctcagactgcagtggaataaaattcaaaatcaactctaaatgaaccatcaaaacaatgcaaatacatggaaattaaataaattgtagaaattaaataaatacatggaaattaaataaataattaaatttaagatcaacctggttctgaatgatctttggatgaaatcaagatttaaatttaaaaattctttgaactgaacaataataatggcacaacctatcaaaacgtctgggatacagcagaagtggtgctgaaaggaaagttcatagcatcaagttcttccatcaaaaagtctgaaagagcataggttgacaatgtaagataacacctcaaggaactagaggcacaagaacaagccaagcccaaacccagcagtagaaaagaaatatcaaagatcagagcagaactaaatgaaactgaaacaacaacaacaacgaaaatccaaatgataaatgaaatgaaaagctggctcttagaaaagataaacaaaattgatagaccattaacagcattaaccaagaagagagaagatccaaataagctcaattagaaatgaaacagaagatattgcaaccgctgccacagaaatacaaaagatcatttagggatactgtgaacacctttatgtgcacaaattagaaaatgtaaaggagatgaataaattcctgcaaatgtacaatcctcctagattaaaaaaaaaacaactctgaacagactaataacaagaagcaagattgaaataataatttaaaaaattgccaaccaaaaaaaaaatgttcagaaccaggtggattcacagctgaattctactagcctttcaaagaaaaattggtgggggtaagggaggagaccacccctcatattgtcttatgcccaatttctgcctccaaagaaagaaaaagtaaaaactaaaaggcagaaatgaaatccacaagcagacagcccagcgccacaccctgggcctggtagttaaagatcgacccctgacctaattggttatgttatccatacattacagacattgtatagaaaagcactgtgaaaatccctatcctgttatgttccattctaattaccagtgtatgcagcccccagtcatgtaccccctgcttgctcaatcgatcatgaccctctcacgcagacccccttagagttgtgagcccttaaaagggactagaattgctcactcggggagctcagctcttgagacaggagtcttaccgatgtccccagccgaataaaccccttccttctttaatttggtgtctgaggagttttgtctgtggctcatcctgctacaggggcagggccaagatggctgattagaagcggcatcccatagaaaagaaccataacagtgtgtgaatgctgtaccataacctgaggtatccatgttctttcatcagaactgactaggtggctggcgtgatccatggagaggaaggaagagcagtgtggtgtggcagcccacctgacacccacatgggcctggggagcccccaccccacagccaagggatgcagtgagtgagcatgctacccagcctgggaaactgctttttccatggaactatgcaacccacggattagaagattccactcatgaacccacaccactggaacctaaggtcccaactgttggaagcaagagctcagagtcgcaaagaacatgggcactgaaacaaggaatttctcagcaaggcaaggcacatttacttctgcagaagggtgccagtcatgtctctggctgttttgagagcacagcatacaagagagggaaggagtttttatccctaacacagtccctacttctgtgtgctgcccccattggctggagtcagaccacacaatctaagctaactcgatggctattttaaatcgagactggcaggaaggttgtttacagagcaggtaactaggagtgaggaggacttcttccaaataaggaagagatgtgggttacggattgcgactggggagaagagatgtttacagagcaggtagctaggagcgggaaggtataaggaagttgattttgagaacaaacaacaaggaagttaccctttgaagaggaacttattatgcctgacacaaccctggagctgagcagattatgaacagcctgtcaggtagaatctgcttaagcctgccgagttcccacggtgggggagaccagcaccaccgttgcagttggctgctgtctaagctgtttgagctccttgagggagggacagcagccagcactgggactcgaaactgcctaacaggctaagatccctggatggggaaagggaagcagccatctctatagctcctggcctcacttttcctctgctagatccaggaaaactggacagcttggtctcaagaggtgtcccccacagcccaacacatgggctgtggcagactgtggccagaatgtctcttcaggcctgacgctgacccatctctcctcactggtcagggcctccctgcaggaactccaacatctccagccaggggctcagggacataactctgatctccctgggcctgagcccctagggggaggggtggctgcagtctctgtggaccagcagacttagcctttcctcctgctagttctgaggaatttgagcagcccagatgagtgggtttccccccagcaaaacacccccctccaccaaggaacagtcaaagtgcttcattaaatgggttctgctccccatgccacccaactggtgacacttcaacaggggttgtcagacaccctatacaggagccatcttaatggcatcaggttggtgcctcttgagatcagagatcacagaggaaggagcagactctgcttttctccaacctccttgagtgacatctccaggcatgggagtgaaccagattaatagggcctgaagtgaacccccctcaaactgcagaagccctacagaagatgtacctgaccattgaaagaaaaacaaacaaacagaaaggaacaacagcatcaacaacaaaaaagtacccacaaaaacctcatccaaggccaggcatggtggctcacacctgtaaaaaggttaacgtgtttttgtgattggctattgtttttcagtaactaacgtataggaatagattgaaacagaaatttctctgaaacagcgccggatgaatgcctaaaggggctcacacaacctgctctgagacttggtgaccattatttttgtccacgttcaattgagttcaaatttaatatttaacttttccagtacattcggcctcaattggatattcaattgtattaaaatacccttacggatacatcgggaaggcatagttgatatatattacagatacagggtaagcacaggagaattaaaggcacaattaataaaaattaaaccccacatggcgttgcaagcagagtaatattgtgagacttgccaggaatatacacacaacatttagtatgcagtaaggcgcaaacccctccttgggctgtggtaagcatatctaatgccatttgattttgcaacacaacaatacgcagctgagcaaattcatctgataacaacataagcccagtgctactatcattaagagctttttctacatgtaagctaaatattataatttgttggtgaagcaagattgtaccagtggcaggggagaatactgtgatagggtaccaccaccagggagtccagcacatttgtaaccagcgatgtttgtaagcatctagattactggggaggggaatattatcctggatggtgaatagaattaatggtcacccccaagtgcatctccccatccaaagtgggggcagtatcaccaccgataggatctgcatacccagagggccccccaggggacagcaatggagctactgtaatcatagtgtactaatctcttattaaaataggaaagagattgttgttcattgggtgcaatgttgttgatttggagtatgtgttgacaattgagtggagaaaccccagagtaacattagaggagccatttaaggcctctagacaaagcaggggctatatggaatccagccaccagcacagaaggttcgtagtatataccattccaggaacattgggcagaataccaaggctttcaatgcaaggtgagggtggagttcatcttttgtctgacttggcaaagattgattttttagtgtggtcaaatgaagtccaggttggattgcaagtgctgttgttgcagccccattggtaacaacatagccattcagaaatgttgtcagggatgattctccaaggtagaccatttttggcggcctctagcaactccacgtatagccaacattgattgcagttggcttctgttgcagcagtggctaaaaagttgatgaatttattcttggcctcagacacaaagacacaggtgctgaccattagtagataggttattccctgtaataacaaaaacagaggggaacatcatattgtttttcatctttaggaaattgtactatgccttcattttctgctttcatagctacaaggtcaccagccttagggttgggatctgatggacgctgtacccatattttggctccaggatttaagcttcctgtaccaggggatctgaatccccaagttctgtatgtagcctctgttgggcaaagatttcctcaggggttaattgtggacaaggtaccactaacaattgagcaaccagcatctgtggttttatagcaaaagaatctggagaggtattgtataaaatgtcctttaactctccccggtaatcactatcaattattccaccatacattattatgcttctcattgcaaggcttgaacatgttgtaatccatttacccacattcaagatcacagttatggtggaaatttttgcctgttgatcttcctgctgattaaatagtctgtcaagaggaagcagagacacactagcatcaacatggaaaacagggccaggcacagtgactcacacctgtaatcccagcattttgggaggctgaggtgggcagatcacaaggtcaagagattgggaccatcctggccaacatggcaaaaccccgtctctaaaattacaaaaataaactgagcatggtggctcatacctctaatcccagcactttgggaggccaaggcctgctgatcaggaggtcaagagatggagaccatcctgtttaacatggtgaaacctcatctctactaaaaatacaaaaattagctgggtatggtggtgtgtgcctgtagtcccagctactcgggaggctgaggcaggagaattgcttgaacctgggacatgaaggttgtggtgaacccagattgtgccactgcactccagcctaatgaaagagtgagactgcatctaaaaaatgaataaataaaaaataatacaaaattagctgggcgtggcagcctgtgcctgtaatccaagctacttgggaggcagaggccagaagaatcacttgaaccgtggagatggaggtggcagtgagctgagattgcaccactgcacttcaatttggtgacagggctggattccatctcaaaaacaaaaaacaacaacaaaaaaacatggaacacagtgacgatgggagtatgcaccaggattcagataccttaccaatattgttttccccaaacctctttattccgcattaaccatttgtttcattgccacttgggcacccaggtagtaagaccatttgctactgacaaagagttgatataaaagtaacaaatccctctggcctcctcctgaatagctcggagaaacgactactagttcagctaactggctgctcccaccccttccttcatcagaaatgcttatgtttttaacaggattataagccacagccctccagcattgggtcccaccaaagtatttggtggatccatcagtaaaccaagcatgtttctgatcctctgggcttagttctttaaaggatttgccccatttgatgtgtgtgtgtggggggtgtttctttccctatctgcaggacttgcttggttgtttcctgagctcgcaggttttccacatcctcatgtaaaagtgatagcccctatgattttggcttagcctggttttgtatgtcccatttccattttatgatgctactttctgggcatgccctatctggtgggttttgggggaactcatgaccaaagtcataatagaaatttcaggcctcataaagacatcgtggttgaagcagaggtgttccatttccagcaaagctcaatagcaagctaacaattgcttctcaaaagaggaataagcttttccagcctctggcagtttctgggtccaaaacatgaaaagtaccctctttccatcttgtttctgcctaaggctccaattagcatgttgatctacgacagttactcgcagttcatcaggcccatcccatataggccatagatccagggccagttgcactgcttgtttagcttgttcaaaagccatgctgtctttctctccacagtgagagtcatacctttttctagtggctgcattcagatgttgtaaaatgttacccaagtaaggaatatgatgtgttcagaatccaaacaagtcaatacatttctgggcctccttcttagtggtaggggttgcaaattatagtattttagccttagcctttggtgaagtggactgtttctttgcattccataggatgccaaagaattttacactttgtgcggatccttaattttactaggcttaatttcccatttttgagataggaactgggtttttacatgctctaagccccggctgactagttcttcagttttaccctgattgggccacctggacagctgcttttttcagcaataggctgatagctttgagcctgatcagtcaagacattgactggcattgggccagggccagtccggaagtcagattagcattttccttttccagcttatatttctcttgtagcaaccagcccctatcttgacacattaacttataagcagcaatcaaacactatccactttgtgagattccctcagcatctcctttggtgactggaatcccctgcagcacttcacgcacagtcaaaggtttaaattgcactaatttagattcccaattcccacaaaggccagttcccctgaaccattcaatcacaaagaaggagaactgggagtgatcccatctcaggatatgggaaatccttgagcctccagccctatccttctggtcaaaaaggggcccacttttgttttcaaatcctgtttgtgatgccaaaaatgttctgtatgggaaacgtgggagaggagaagaaaagacatacatacaataactttaatggtaaacaagctttaacccacatcaatatcaatgcagacagaataaactaatgatataataagcaaatgatataataagcaaataaatataatacacagattgatataataagcaaattgcagtaagaagaggagatgggaaaagatatatatatatatttaccctcactagactatggaggattaccaactgagtaggaagaaacagcccaggctccagagtcggccacccattcatgcacagacaaggagtctcatgaagcttcagggtggtctgggaccctagctcttttgtaacgagttgtttggcataaggcccagtgaggagggccatttgggacttgcctcacggaacacaaaagggtcaagttgtttttgtgattgtctattgtttttcaacaactaatgtatagtaatagaatgaaatagacatttctttgatacagctctggatgaacacctcaggggctcacaaccaggacctgttctgggacttggtgaccattgtgtccacgttcaattgagttcaaatttaacatttaacttttcctccataaattctcctgtcttcatgaattggctctgtctaggcaaagggcaaaatgaaccccttgggctgttacataacctccacctcctgggttcaagtgattctcctgcctcagcctccggagtagctgggaccacagatgtgcaccaccatacccagctaattttttacattgtgagtagagatggggtttcaccatgttggccaggctagtcttgaactcctgacctcaagtgatccacccaccttggcctcccaaagtgttgggattactggcatgagctacctgtgcctgaccctaaattatttctatctcttatagcagtttgaaattacttaaaggttgtttcaagttgaaaaaataagaagaatgtggataaaaataaaatataaatagataaaaaaattacagggattacaaaatatatatgtaaatctggagtggtcaaaaatgacaaatttgatttatttataaggttttattaaaattagctttaatcgttaatacactattaccaaagtaaaagctgattttctcttgaacaaaaattttatgtattattaatatgacagcaaaatacttctgttcacctttgaatacattcaacaagacagagagtaaaaaagagataaaatgttcccatgctctggcatggaccaggctcagctctgggaggaagccctgcctgaaaaggctgcagcttaggctgtcactcttttcttcactccgcccagcagctgatcacatcttctgtcactcagtgtctgagggggcgggaccttaagcattagccaatcagaggcgctgggctggaaaccgtccaatcaggcacgcagctggaatgaacaggacggcttccggatttggcggggtctttgtctctccctgcagctggagctccaggtcgtctgttcactgctctctgtcttcttctcctagaggcccagcctctgtggccctgtgtcctgcaggtattgggagatccacagctaagacgccaggaccccctggaagcctagaaatggtgagagtgccggtccagcatcccgagagaggtgaagtgtctgtggcgggactcaggcctcccctcagtcagctccacaatctgcaccccgaattctccttacccagctctgcctcagtcccattcagccataagatggcggctacgctgacagcctggcccccgggcgtcctgtcgcttccccgcgcagtgactgtgcccctggcctggagcgctctgtgggcagctctgcacccgcagtgccgtgtctctcccagattgtgcagggaccaccggagggtcttcaggggagaatgctgactcgcggtgcgggttcatgaatgggaagagctttggtctgtggggttcacagtttctcttttctgctattaaaattgtatggggccgggcgcggtcgttcaagcctgtaatccccgcacgttgggaggccgaggcgggcggatcacttgaggtcaggagttgaagaccagactgaccaaaatggggaaaccccttgtctactaaaaatacaaaaattaggtggatatgttggcgaatgtctgtagtcccagcttctcgggaggcagaagtgagagaatcgcttgaacccgggaggcggaggttgcagtgagctgaaatcctgccactgcactccagcctgggcgacagagcaagactcttgtctaaaaaaaaaaaaaaaaaaaaaaaattatgggagtcactgcaaaaatatcaaacaatttaatcaaagagtgattcaagaattgtagagcacccagctatagtttgtagtttgtggtccatgggagaggcttgaagaaaagacatttataaaatgcatgatgaggaaaaccaaattcaataatttgttaggtttagtaatgtagtttcttaatttgtacaatcaaggtggaaatttcctggttatgtaattagagcttaattggcagtttatagttgctgaagcctgaattttgtttcccctaatgtagtaatttgccaaaaaatgcacttgagcttagatttttttttttttttttttttagaaatagaaatccggggactagagcctcttcagtctaattgcctgccacttaattattttcacatcccacaggggactgactttccctggcatttttcacatgtgtcccaagcagggcctcaagtgtcccccatgttcctcaattaattattattattattattattttttgagacggagtcttgctctgtcgccaggctagagtgcagtgtcagatcttggctcactgcaacctccacctcatgggttcaagcgattctcctgcttcagcctctccagtagttgggactacaggcaagcgccaccactcccagctagttttcatatttttagtagagatgaggtttcaccatgtttgccaggaatgctagttaccaaggaaaaatatagggaaaatctctcttccattttggctgtagacaatgaatatatttccacaggaaaatgtggtagataattgaggagttacatggattcatcaacacattagttcctctttttgcagggtaaattttttctatatccttttattttgatttctgagttaaatgctaaattttaagtgatgaaacatggtaccttctagaagtgttcccatatgactaattttttactacattattttatttatttacttatttttttgaaacagagtctcactccgtcaccaggttggagtgcagtggcgtgatctcggctcacgcaacctctgcctcccaggttcaagcagttctcctgcctcagcctcccaagtagctgggattacaggtgtgtgtcaccacgtccagccaatttttttgtgtttttagtagagacagggtttcaccatgttggccaaaatgttctcaatcttctgacctcgtgatctacccaccttggccttccaaagtgttgggattagaggcgtgagccacagtgcccggcctactgcattatttttaagataaataataaaataatacatacattgtctgaaagaagtagatatatatgcttttcttataggggtataaaatgcaagcatcttagccaggtgcagtggctcatgcctgtagtttcagcactttgggaggcctagacaggttgattacttgaggtcaggaatttgagaccagcctgcccaacatggtgaaactcatctctactaaaaatacaaaagttagccaggtgtggtggcatatgcctgtattcccagctacttgggaggctgaggaacaagaatgtcttgaacccgggaggtggaggttgcagtgagccgagatcatgccactgaactccagcctgggccacagagtgagacttcgtctcaaaaaaaaaaaaaaaaaagtaagaaccttaaaatttccttcccttatgtaaacactgcgtttgagtaatttccctggatttttcaaacacatagtttcaaaaactaagtgagtaattctgacatggaaattaaagcttgaacctagtgactccaagctaaggctaataattaagcctgcaactggatattgaagactcagttagttttttctggggagcctcccgtgcaggtgtccagcctgctcaccccagccatagaaggagcctttatcctgagagaagctacagagccctggaaagctggggtcccacaggcagatgcagttgaggttaagatgaaaggaaactgagagggtcttactgatgatgcagtcgttatgttttgtggcactttctgtactttgtaaaataaaaacattagatttatgtaaaaaaaaaatgaattccaaaaaattattgcaacaggagaaagtaccaactaaatataagatctttatggcttgcaaagatgtaggcagaaaagggctttcttttttagggagaggtaaacaagataagaaaggaggtgggaggtgaatggcaaatggagagtgaaaaagtcagattttagatcagaggatgtcttaccctgaaatcagcatgttcttaggaggaatgtaaaatggggttgtatgttgactcagactgagggtagctcaaagttcaggagcctgagggagggaaataaacttaagaaaagtatgattaagaaatattttattttagtccgggcccagtggctcatgcctgtgatctcaacactttgggagtctgaggcagtcggatcacctgaggacaggtgtttgagaccagcctggccaacatgatgaaatcctgtctctactaaaaatacaaaaattactggaaggctgaggtgggcggatcacctgaggttgggagtttaagaccagcctgaccaacatggagaaatcccatcactacaaaaaaaaaaaaaaaatcaacaggtgtggtggtgcatgcctgtaatcccatctactcgggaggctgaggcaggagaatcgcttgaactcgggaggtaaatgttgtactgagctgagattgcaccagtgcactccagcctgggcaacgagagtgaaactctgtctcaaaaaaaaaaaaaaaacaccaaaacaacaaaaattcgccaggtgtggtgatgggcacctgtaatcccagctacttgggaggctgaggcaggataattgcttgaacccaggaggtggaggttgctgttagccaagatcgcatcactgcactccagcctgggtgacaaagtgaagaaattattttgagcactgaagacaaattcagctgtttttttaatgagaaaaaggagaaaatgtgcagagcgtgtgtctgcctgtgtgataggtaagaaaagagagcactatcttagtcataatgggaagagtgtttgtttgcataaattgttcctggagcacacaaagaatggagaattttattaatcacaaacattttccagtattatctatgtgtttcatctttccccatttcttttctttgttctatgcatttctcccatttggcttttcctgggctgcgtctcacatattaaactggtaaacataactacagtgttttgctaagttctgtgagtagctctaccagattattaaaattcagagaggttatgggactaacaagtttttaaacagtagctcagaagcatagatgggcccatggggtttttgactggcatctgcagtgaggacagtgttgtaggaccaagccctgaatcagggtctgtgttgactctgggtggtgtcagaattcaaatgttagacaataagttggtgttggagaattgtttaatgttcagctaactctacagatttggtgccagaaaaaagatatcacagaggcctggcctggaataaaactaggtgtttgggaatgggagctctgctttcccatacacaggctgtcacactgcccattgtcctgtgattcaggtcttctcccagggtgacagaggactgaaaacttagaggacaggagctctgattacagacccccttttcccacagctgccaccacaagattcccacccactcacaaacacacacactagacattgacacgtccacactcctcccaggactaggcaccaccctcagaaacttcaccacagcatttttgaccctagtgtttcttgccaagaacccacaagtctctgcaagtctcctggcatatccccatccacagatgctaaatctgcagcagcaaccagttttctccaccaacctaccattttggatcagctgttcataatctcatctgcctgcacacagtaataaatcagagtatggctgcattgggaccactatctgcagcaaaaatcagtcctctcacctgcattgcactctctcctgcccagggatttaattttttattttagcttttatttttgattcggggtacacgtgggtttcttttacaggtaaaattatgtcatgggggttttgtgtgcagattattttgttaacttacgtactaagcatagcaccaaacaggtatgttttctgatcctctgagttctcccaccctccaccctcaactaggcctcagtgtctgttgttctcctctttgtgttcgtgtgttcttattatttagctcttacttataaatgatagtacattcatttggttttctgtttctgcattattttatcttttttttttttggagacggagttttactcttgttgcccaggctggagtgcaatggtgtgatgtaggctcacctcaacttccacctcccggttcaagtgattctcctgcctcagcctcatgagtagctgggattacaggtgcattccaccatgcccagctaattttgtatttttaatagagatggagtttctccatgttgggcaggctggtctccaactcctaacctcaagtgatcaacccacctcggcctcccaaagcgctgggattacaggtgtgagcactgcgccaggcctctgcatttgttttctaagaaaaatagtgtccagcttcattgatgttattgcaaaggacgtgatttttttttaatggccacagagtattccatgatgtttacgtaccatattttgttttgactaaatcttttattttattttatagttggagacagagtctcacttattgcccaggccagagtgccatggcgtgatattggcttactttaacctcaacctcccaggctaaagcaattctctcctacctcatcttcccaagaagctaggactacacctgggcgttaccacacctggccaaattttctttttgtattttccgtggagacaggattttgccatgttgcccaggctgttctcaaacttctaagttcaggcagttcacctgccttggcctcccaaagtgctggaattacaggcatgggccaccgcttctgaccataccatattttctttacccagtctaccattgataggcatttagggcctgtccttgtctttgctattgtgaatagtgctgcagtgaacatgcatgtggatgtgtctttataatataataatttatatttccttgggtatatacccaattttgagatttctgggtcaaatgataattctgttattagttctgtgaggaaccgccacactgctttttacaattgttaaactaatttacactcccaccagaagagtataagcattctgttttctctgcaaccttgccagcatctgttattttttgactttttaaaaatagccattctgactggtgtgaggtggtatctcattgtggtttttcttttaatttctctagtgattagtaatgagcatttttttcatatgcttgttagccacatgtatatcttcttttgaaaagaatctgtgtttttgcctacaatttaatgaagttgtttggttttttcttttaaacttgtataagtttttaataaattctggatattagacctttgtcagaggcaaagtttgcaaatattttctttcattctgtaggttgtctttttcctctgttgatagtttcctttgctgtgaagaagttccatttgtcaatttttgcttttgttgcaattgcttttggtagcttcatcatgaagtctttgccagtttctgtgtctagaatggtgtttcttaggttatcgtgcagattttcttataattttaagtttacatttaagtgtttaatttatcttgagttgatttttgtatatggtgtaatgaagggatctagtttcagtcttctacatagtgctaggtagttattttagcaccatttgttaaatagagaattcttgctgcattcctcttgtcagctttgtcaaaaatctgatggttataggagggtggcattatttctgggctctctattctgttgcattggtcttgtgcactcgtggattttttataacatctttctctcttctcctttttccccataaacattctttgaagtgcatacagtgtgaaaaattcagatgtccaagagttcaaaactatttaaaaagttccaaaacaaattttgctattctgtctgttcttaagggatttagattatatgtagatatttttctctgcttttttgaaatatatgtaaatcatattaacagctaaataaacctttttcattttttatgactccagattatctttatctggtacttcagatttattgctttgtttttgcttctgaaaagtttatttttttcatttttagtcctttaaggtagacacagatttgtttagttaaaactcatttaagagcacacagaagcatagcacaaagataaaattaaatttagcaatacagaatgataaagactaaaagatactaagtttctttgacagaaacctgattatccaaggtaattatccaatatttgcaggctgaagtactaatactgcaaatgcaagaacagttcaatgcatgaactcaacagtggaatctgtagttgtaccttgttttctatttattacttcagaacaattagcatagttatgtttagtgtttgtagacaaactgcattcatataaattaaacagtgtttcctcttttttgagacagactctcactctgtttcccaggctggagtgcagtggcgtgatctcagctgactgcaactgctgcctcccagattcaagtgattctcctgcctcagcctcctgagtagctgggattacaagtgcacaccaccatgcctggctaagtttttgtatttttagtaaagatagggtctcaccatgttgtccagcttgatcttgaactcctgacctcaagtgatctacccatctcagcctcaagttgctgggattacaggggtgagccataagcagtattttctacaatattatgaatataaagccacaatacttactttgaatcacttaaatggttattttaatattgtaatttatacttttgaaatataaagtgttttaactgaagtatagttacagtttttaaaaatggtacatatactatgacgttcattaaaattattcatacttagatatttatatctaatagccagagaaaatttactaccaaattattacagtagatatttgtctgacatatttattactttattcaataggaataacaatgagtaaacacaatttaggtatcttttatttcactaaattggtatgttcctattacaggacagataaagacaggtgatgtggccaccccaacaccataatacctcttcagttagctatgttgcaagttctaatatattccactatacgaacacaatcagattctatttcttcatcaaaaagtgttgtttgaagttgtcagatgtatttcaatatagaacccccattcaatggctagaagatgagacagcagcagagatggaaaagaaactttataaaattattctttctgaaaatctgcaccctcctaatgctcatgtttctcatggtgagagtagctatacactttgagtgtttcgagagaaatttattttaggagaatattttctggctgacttaacaatcttatatctaatctgacctttttcttaagatctttttaacttccttctctcaaaattatcttgctcagagggagatctgtttttctctccaatgctttgtctgtttcagaagccttactagtatcccgtggtgtctgaatgaggtgggttgtcacagtgaaaacttctgatgttatctctatctggactcatgttggaaattcaatattttttccatgtcaccattataagtagaaagtgaggctgaaacactgctcccagtttcattattgtgaagatatgattctacccaggaggcctgcaggctctcctcctgcagctcaggcctcactctctgttgtgacattagagtgttgctgtggcaaatgtagttcacataaaatgtgagctgtgctctgggctgtgcctcagtggcagatagtagaggtcaagagaggagaccagcaaccaggggaaagcaagcaggagtgctgtagcccagtgccagggagtacagagccactgctctaaaatgtaaatagccaaagagagaatcctattcaaccatttttgtagcagagtgaaagcctaccttcagcagccactgggcttcaagctgctaaactacctcctgttctgaagatgtggaaagtttatttgtcattggatataagcatttagcatacccagatgccctattccatctccaggtgattttaggatgaactatgtgtgacatggtgctataaattcttctacttgtggactaattatggtgaccatctttccatctttgtattctgttaaacatattgaccatgatgtatgtcactttcaagtttaattttataagaaagccattttctttctctggggctgaagaaaccattttctttttctggggctggagcttctctggggctggagaaaatttttcttctttttctgtttttgtttgtttgtttgtttgttttttgagatagaggtctcactctgtcaccaaggctgagtgtagtggcatgatctcagctcactgcaacctacagctcccgggttcaagtgactctcctgcctcagcctcctgagtagctgggattacaggcacctgccactgtgctgggctcattttcatgttgttagtaaagatggggtttcactgtgttggctaagctggtctcaaactcctgacctcagttgatctgcccacctcagcctcccagagtcctagtcctgggattacaggtgtgagtcactactcccagcccaatttttcttttaattattgtttccaaacactgtctagaattaccagatgtgatataaacacataaggtgccaaccagaatttactctagaggggactttccctctcaggcttccagtcaacttatacttgtgcagcaaagtgcacgctgtcccctaaatatgcaggcagaattgtgtctctgcctatttggtatctagagttctctacaatcacttctagagaggctagatcaaatttctacaaacttcacgggcagcaatcaatcattttacctctttcactgactcttgtatcttcagactgaaactgattcagagaatatggagcccagaaacccaatcagagtaacatgtgtgcattgagtagacatagagacatgagaatctccactttcttcttcctcctcttgccaaaatgcccacaaacgtacaggtaatacctgctgctactccagccattcaggccataaatctgcagcttcaaattttgaatccaggtcatgagatttgagaaataaaaaacttttatctgaaaaatgcaagtccttttggttatcaaactcagagagacattaaaataaaagtgcagttacatctttatcctattaactatgtattaatctcttgaaactgttccctattggcacaagtagctataaatgacactaataatgccacattggacactatatttttgtttgtttgtttttgagatggagtttcaatcttgttgcccaggctgagtgcaatggcacaatcttggctccctgcaacctctgcctcctgggttaaagcagttcttctgtctcagcctccccagtagctgggattacagacatatgccactatgaccagctaattttgtatttttagtagagatgggatttctccatgttggtcaggctggtcttgaacttctgacctcaagtgatctgcccacctcggcctcccaaagtgctgggattacaggcttgagccactgagcctggcctggacactatattttataccctaaaccattatgatatatatctaattaataatcaatgctatttctgtaaataaaaatttctgaaaaacaactttgtgtcagcccactctctgtccctctgttgttgtctttacaaatcctcttgtaattgctgctaattaaagtgtagattccaggcaacttgaatctttgctcccaggttatgatccttaaacttgacccaaataaactgtctacttatgttcatgttgtgtcagccttttttaatatatatatagacttatcatttagaatgtgctagagcagccttcatgaggggatctctacttagattgtattccacttgctgtaacatcaaaggatgcagagccaggttgatcctacctagaatctgcaattaaggtctggcctctgcctgggatttacaaaaaagcctggactttggatagaaaatgtacagaaaactaacaaaaggcattttctgcgttgtgagatgtcaacctaaacatcttacagccccattttgggagtgtggctctttgagatttttcacatcttgttcattgacctgctacagtgatgtgagaggctccaggaggaaatagaatctgatggcagaatttgtaagtgtaaataagcatcttaggcatgagagatcaaggccacaaagtatccagagccatgatcacaattataattacctgtaaagtggaatactggagaagagttatttttgttatttcctttacccatgagctagcaaatcagaatgggtgttccaggttctggagttccaccagggcagttccattttctatttagaatcagcctgagtctctccagcctggttgatcattgggccatcagcccagggtcactgggaattccctcaaaatcacctaggtgtctttgaggtatttgaggatgttcagagcagaattgtgttagactgacaagagtggttaattctgcttctgtctcagtgtaagagaaatgagtcatcctgtgttttttcatcccctcatacaagaggtatctttggttgctacccagatgagagtttctccagtttcctgttacttggatgataaagaaggaggagatctggagactcaaacagataaactagttgcttcaatttcatatagccattaaaaaaccatgaagcagtcatggttcctacagtccagaaatgtttagtctagactagcaactggataaataattatgcatcatatggttggtacaataaacacgtgtccaaaatcttgggctttatttagtctactttgtttatattgtgacttctgatgtctacatctcaaggcatatttatgaacagaaggattattataatttttattttgagacggagtctgtgtcacccaggctggagtacagtggtgtgatcttggctcactgcaacttctgccaccctggttcaagtgattctcctgcttcagcctcctgagtagctggcattacagttgctggccaccatgcccagccaatttttgcatttttagtagagacagggtttcaccatcttggtcagactggtctcaaactcctgatgttgtgatctacccgcgtcatcctcctgaagcgctgggattacaggtgtgagccaccacgcctggccatataatttctatttcttttaccttgctaagtgtacatatttattttctaataaaattaccctagaaaggctgggcatggttgttcatgcttgtaatctcagcactttgggggtctaaggcaggtggatcacaaggtcaggagtttgagaccagcctgaccaatgtggtgaaacgccgtctctactaataatacaaaaattagctgggcgtggtggcacacatctgtagtttcagctactcaggaggctgaggtagaagaatcacttgaacccaggaggcagagcttgtagtgagctgaaatggcaccactgcactccagcctgtgcaatagagtgagacttcatctatttaaaaaaaaaaaagttaccctagaaaaccttaaaggatttgtttaaattgcgtattagtatgtagcataaagttgacagggcagtggctagaaaatattaaaattacagaaattctgggatttaagtttttcttttaggtaacctttgaaaaaagaatactggtagtactgcagtggcatagagggaagaattctacatagagtccccaccctgcctcagacctgttcagattcaccctttttggaggccttattttggtctgactataccttggagtctttcctcagagaactgattagaagagatcagagttttggctggtgaatcctgttgcctttctagagctggtgttcacaatttcttgaaacccaaaaacagataaatgggataaataacgtatgtattttagggtcctagattttaaatgttctattaaaaccagtgtttgcagagacattatatttagacacttgttttctattcctgcagatccagtagttgctccataagtcacaaaaaagtaaatataaagagaataaaattttgtctaaactacattaacctctttctttctgtatctctttcatctgtctatatttagcttttattccttataatttaaaaaaaattgatgacagaggaacagaagaagaaatagagattctgggcccttttttgaaatcctggaaattattaaacccttagtaccagctcccaggatgttacgagaattaaatcacataatgtgttatgcccagcacagtgctctgtatcatgctcttgagcacacagtatctgtttaataaacattgcattagtacatgtgtacatgttgtttttaaaatacagacttattcagacattgctgccttctgtttcctctccttgtttgtaccagaagtatttggttgtgacaagagtgctaagtgtaagggatcctgtgctgtgcctgcttctctaactaatgtaaataatgcgccaagggggagcaacatcagctttgacaggggacttgtttaaaacacccatgcatagacccttttcaaatctgcagaattacattacataaagtggggccaaaattaccaagtgatttataagcttgttaaagcttgagaggcaatgcttagcttagtgattatcagcccagggttctcattaggatcacatggccaatttgcagaaatctcttgtgccctccccacaggttctgtttattgttctgggtggaagcatccacgttgttttaatgaagggcctcatgtgactctaaggtgaggccagaatcaagtatgaaggcttcaaaatacattcatgagagttaaattccacctttgcactaaagggtggtcacagggcctattctatttgggtttggtagggacaggtcagtgtggtgcatatttccattactgtggcagaaattgctggtgtctgtggcaggggagggcacctgaggacaggaaaggagaaacttatattttcatcttcatggagcagctcattgctcctgaatctcttctgttttaaaggatagaaatggatggatttttctgtctttttctgccaattgatgccatgctagctggtaaacatgtggcactgacacctttaaaggcatattctcaagatgcaggggtaatttgtccagagaatcttcatctgagaaggaattccagagaaggaggagatcagaaagagaaaaaaaaagggcttcaggtaaacatgcctcagctgaaaagctatgtccactctgcctcctggaatgccatgtatctagtacttgaaaacttttacttctctacttgtgtttttcctccctaaggagtttggtttaagtacttcttaaaattcttatgatagtcaaacgtgtctgaaaagtatttcttccctgtatcccagagccttctcttcattctctacatcataacttcttatacgccatgcagatttatcaacaggaatttatgatctgcaatattaaaaatgttccgtttgtggctgttgaacatggaaagatgtggatactcaagatttctattggggaaaactgtggtccttagtaaagatggagaaaatataatgttgaggctccattcatgtgttccattagctgtatgctgaacaggattaaggaattgcttatttaggtcgggcgtggtggctcatgcctgtaatcccagcactttgggaggtcaaggcaggcagatcgcctgaagtcaggaattcgagaccaacctggccaacatggtggaaccccgtccctactaaaaatataacaattagcctggcgtgatggcaggcacctgtaatcccagctacttgggaggctgagggaggagaaccacttgaacccaggaggcggaggttgcagtgagctgagatcgtgccattgcactccagcctgggggacaagagtgagacttaatctcaaaaaaaaaaaaaaaaaaaagaaaattgctcatttaaatgtgatggcatttattacccagaaattctgaaaaaaattattaggagatacctgctttctagggtgttaatgaagcctgcttaatattactactaaaaattacagaacataggaggtatctgtattttgaggtttgcataaaactgatgattctttttgattacattcagattttatttgctttttttaaaaaggaatatttcaatagtgatgctgtattcttctgtatgcattaacacatcataaaaatttgtcctagtgcagttaatggttaatgattcacttgcttaaataggtctctgacagacttttttttactatatagctaattatttttctcttcattattaagtttcattatgcagctgatgtgaacaaacaatcatttaatctggcagctgttcttttttctttttttctacatatttttctttggaaaattaaggctcttatctttgtttacaggccagaaaaactggaaaaaacacaggctcttccacttactggatgtttgacaaaatattcttcttgggccaaaaacattgacattattggttagcttgctagaaattcaaaaaatcagactttattccagatcttctggaaaaaaaccctgcataacaaggtcttcagcttattgtacatattaaaacatgcctttttcatctgaaaaatattcacaactcattccatatgatgtaaatatagcactcaaaaatgtacatgtttgtgttcatgcccttaattttatagtttattttctagaaaaatatatgaactgatgttgtggatcttatgttcctttattttctcagagttagagaatactttagagaatatttctgtgttgaaaattattttataggataactttagtcagtcctataagtcagaaccagttatctttactctctcatttcaccttaagtcaaattaaaaattccgcccataaccacttggtgaaaatgtgtgtgtgtatatttttcaggggccattgcaatttagagatgtggccatagaattctctctggaggagtggcattgcctggacatggcacagcggaatttatatagggatgtgatgttagagaactacagaaacctggtctttcttggtgagaaaaactttaatacataactcataatatacacaaattgttttatttctcttttttgtagaatgttagtaatttattctttttataaaagagtttcagatccagtttttcaagaaaatcttcagaatttgttcatttagaaaagaattactttggtgcctcatgcctgtaatcccagcactttgggaggctgaggcagggggattacctgaggccaggagtttgagaccagctggccaaaatgctgaaaccccaactctaataaaagtacaaaaaattagctgcgggctgtggcatgcacctataatcccaggactcaggagggtgaggcaggagaatcacttgaactcaggaggtgaaggttgcagtgagttgagatcatgacattgcactgcagcctgggcaacagagcaagattctgtctcaaggaagaaaaaaaaaaaagaaagaaaaaaatttcttcaagatatttcatcttaatacaaactttccacatttctgaggtgagttatattcttcactctaaattagtggtaattccagaaatttactgacttaaaatattgtagcttccacctgaaaatctacttgccaccaccaagttttgattcagtagtaccaggtagtaaaattaggaaacctacaaattgaaagtattttcttttcttttcttttcttttcttttcttttcttttttttttttttttgagacagagtctcactctgttccccaggctggagtgcagtggtgcaatctgggcttactgcaacatccacctcccaagtttctcctgcctcagcctcccgagtatgtgggactacaggcacacatcactatgctccgctaatttttgtattttcagtagagatggggtttcaccatgctggccaggctggtctcaaactcctgaccttaggatctgcctgcctcggcctcccaaggtgctgagattacaggcatgagccactgcaccaggcaaattggaagtattttctaaatatttagaaatctctgttacaaatttgtattttgttattaatttactagaatattttatcacatcatctttcctgagcacattactagcttgtaattggagaatgtgagcaagattcatgttatttatttttgataaaacaggtattgttgtctcaaagccagacctcatcacccatctggagcaaggaaaaaaaccttcgactatgcagagacatgagatggtagccaacccctcaggtaggtgtgagtgaaaatgaatacaacagacaacacagtaagaagtccaaggtcaaaaagaaagccagtccttaaggtgtgattctggaagctgtgttccaaaggaacttctgggcagctgttttttttgttttttgtttttgtttttgttgttttaaattttgctgtcacaaaggggcatattgtcttatgcttctaaattctctaaaaattctacttttctctcagtgagcttccttcacattcacagtgagagccaaagtcctcttcatgacatataagagacagcacaatccagctgctttttcattgttttggggacacacaaatatcttcctaattttgagaaactgaaactattttttagttttctttttgtatccggtctgaaatttgtgagagtagtagtttctgttgcatttttttttgttcatttttgtgcacagtccattctatttttattactatatagtcttgaaatatagtttgaaattgtaagtacgatattctgttttcttctttttcctcaagattgctttggctattcaaagtttattttagtttcatgtaaattttagaattgtattttccattattgtaaaaaaaaacactgcaattttaataggaagattattgagtctgtaaatcactttggataatatgattctttaataatatttattcttttaattcattgacataaaatattttaaaattaatttttatcttctaatttttttattttgttattgtaaacttttttttacctccttggttaatttttttctcaggaatttatttaatgctatattaaataagattttttcttcctcatcagatagtttgttttaagtgtaagaaaccatacatatacttgtgtgtttaattttatattttgctaatttactgagtgtatttattagtttagacaggttttaatgtactgtttatggttttttaaatataaaattgtgtgatttacaaccagcaacttttttttttttttttttgagaggggctttcactctttttgcccaggctaaagtgcaatggtgtgattttgactcactgcaacctttgcctcctgggctcaagtggctctcctgcctcagcctcctgagtagctgggattacaggtgttcaccacaacacccagctacttttttgtatttttttggtagagacggtgtttcaccatgttggcaaggctggtctcaaactcctgacctcagatgatctgcccgcctctgcctcccaaaatgttgggattacagccatgagccaccatgcctggctggatttttttatttctgtgaataattcttctgccacatacttccatcactacattcaaatagaagcattgacaatggacacaatatagttttgtattggtgtctgaatttgatggagtaaacacctcttcaagttttcataaactgattttagaagcatttccttagggaactgtgtgggtttctttttttctttttcttttttttttttgagatggagttttgctcctgttgcccaagatggagtgcaatggtgcgatctcatctcaccacaacctccgcctcttgggttccagtgattctcctgcctcagcctcccaagtagctgcaaatacaggcatgcgccaccatgcctgggtaattttgtatttttagtagagaaggtgtttctccatgttggtcaggctggtcttgaactcctgacctcaggcgatccgcccgcctcagcctcccaaattgctggaattacaggtgtgaggcactgtaccctgcccaattgtgtgggtttctatgtaggcagaactgaccataaacttggctcaggtaactgaaactgagtcatagaaccgcttcagggatcccagtaaagtccaaagtctgcaggcctgcctacattgttgtaaatgggtgccttcctccaggtctcttgaatgtcaggacctctgccagactctgactgggaggagtttggattggttacagagtaagttcagaattctcagtgggaccaagttgggtgaaccctatctggtctgtagccatgagtaggggtcctgcagtttcccacctgactaagggcaggttctcttctgaatagaacacttctcaatcttaagctttagcagcatttcacaactccctccctggatctcaaatctctcttagtggcgtgtattttggagatggggtcttgctacataacccaggctggtctcaaaatcctggcctgaagcagttctccaacgttaatgtaccatgtatctgtcattacaggtgtgagccataatgcctatttctctcataaaggcatttttgtcagagatggctgacttttttttttgctgtaagggagtatgaaaatagggacttttaatcttttcatcttactgatgtcactctccctatacatttttactttctattttctctttcagatttgtctgtaaatttagattcagatatttaggacaatgtgctagaatttgcatggtatgcctgaagtaaattagataactcatagggacccatattactaaaatagttacttatgaatttaagtttgctgcaggcaaaaaggaattaaaggattttcatcttttttttagcctatatctaaataataacatagtttatttctcaatatttgttttacatatcagagggtctaaccctattctgcaaattgtataattttaaatttaacaatgtaaggctactctttgcttctaaagtttgattatagctgttttattttgtgtaaaaataccatatatttaaaacattaaaagtaactagtttccttaaaatgctaatttttaagtttctcattagaatcttctatttataattatactgcatattctctgaaattttactgccacacagggcatgccaatgattcaaaatacctgcatttagtgagtacacactaacagttaaatatttcagttacctagaaacatttttattttttttgagatggagtcacactctgtcacccagcctgcggtgcagtggtgtgatcgtggctcactgcaacttccaccttccaggttcaagcaattctcatgcctcagtctctcaagtagctggggttacaggcatgtgtcaccacccctggcaaatttttgtatttttagtagagacagggcttcaccaagttcgccaggctggtcttgaacttatgacctcaggtgagctgcttgccttggccttccaaagtgttgagataacagttgtgagccaccacacccggcctgacaattttttaataatgcatcaatgttgcatgctagattttttttttttttttttttttttttttttttttttgagacggagtctcgctgtcgcccaggctggagtgcagtggcgcaatctcggctcactgcaggctccgccccctggggttcacgccattctcctgcctcagcctcccgagtagctgggactacaggcgcccgccacctcgcccggctaattttttgtatttttagtagagacggggtttcaccgtgttagccaggatggtctcgatctcctgacctcgtgatccgcccgcctcggcctcccaaagtgctgggattacaggcgtgagccaccgcgcccggccgattttatgagtaaacatttattattgttttgaagttttatattagtgtgtttttcagtgtaggttttttttttttgggatggagtcttgctctgtcacccaggctggagtgcattggcgtgatcttggctcactgtaacctcttcctcgagggctcaagtgattcttctgccttgacctcctgagtagctgggactactggcgtgtgccaccatgcctggctaatttttgtatttttagaagagatggggtttcaccatattggccagtctggtctggaactggtgacctcgtgatttgcacacctcagcctcccaaagtactgggattacagttatgatccactgcacctggcctcagtgtaggtttcttaccattagtttattgggtgttttggttttacttatgtattataattttagacaatttgcaattctgcttgtatactttaagtcaattttaggtttaagagataaattatgcatgtctgtcacaatcaggttacatatgtatgtctgtttataaatatgacaccaattttagttatggcttatcttatactctttcttagcttattttccatggtagttttatcttgtctaagtaagtactcatggggatagtcttattttaccatgtgtttagtaattaatatgtatttcctttcatgagagaaacatttttgtgatttgaaggtaattttcaaaaaaatatgtaatttttttttcagtttttctttaaaaaaattgttttaaaaacacataatgtaaaatttaccatcttaaatctattgaagtgtacatttcagggccaggcgtggtggtggctctgatctgtaatcccaggattttgggaggccaagacaggaggatacctggagcccaaaagtttgagaccagcctgggcagcatatggagactctcctctataaaaaaaattaataatagccaggcatggtggtgtgcagctgtggtcccagctacttgggagattgagggggagtcaaaattgtgccactacactttagcttaggtgacacagtgagaccccgtctcaaaaaaagagctgttcatttcaggcatgttaattatattcacactgtcatgcaaaaggcttctagaaactttacatcttgtaaaactaaaactcaatgcccattaagtaacaactgctcattttacactctttccagcccttgacagacaaaccttctactttctgattttatgattttgactacttaagatatctcatataagtggaatcatacagtatccataattttgttactggattaattcaggtggcataatattttcaatgttcatcttaaaatgtgacaagattattctttttaaagtggaataatattccattgtatgtgtatgttatattttttgatgtgtttataaattaagagatatatgctggtttagccttttggcttttgtgaatactggtacaaaatacatgtattttcaattatgtcttccaggtcctgtgttgcatattttgtttttttgttgttgttttctttctttctttctttttctttctttcttttttttttttttgagatggaatcttgctctgttgcccaggctaaagtgcagtggtgcgatctcagctcactgcaagctctgccttctgggttcaagtgattcccctacctcagcctcccaagtagctgggattacaggtgcacgtcacatcgccaaggtaatttttgtgtttttagtagaaatggtatttcaccatgttggccaggctcgtctcaaactcctgacctcaggttatctgcccacctcaacctcccaaagtgctaggattacaggcttgagctactgcacctggcctgtgttacatattttagatatagatttataaatgaggaatatttataacattttaaaataatggctgtgtctttgttttccaccagcaatcaacatggattttatttttacacctaatgagtgtgaggcgattttgttggtattgtgttttttgttttcatttctctacaaattagtaattttgtgtgttttttcaaatgctttttcccatttgtttatttttatgtctaagtattttatttaaaatatattattgtatcattcaaggaaataatccaacttcattttatcagtgttgacattcagttttcaacatcattttttgaagagattatttctctctattttgtatgcatggcaactctgtggaagatcatttgatcatatacagaacggtttatttctgagctctctattctgttcttttatctgtttgtctttgtgtatcacattgtttaaattccatagcttttaactgtaggttgtattgacatctttgaaaaataaaatttgttgccccctgagcaagaatatgttgaagagtgtgtttcatattcacatatttgtgaatctgccagtttgacttttgcttttaattcctagtttcataaagtttttgttagaaaacacacagtgtataattttagtgtttttaaagtgattggttgttgttttgagacaagatcttactgtcacccaggctccaatgcagtggcataattgtggctcactgtagcctcagcctcctgggctcaagtgatcctttcacctcagttttttgagtagctaggactacagacatgcactaccatgtctggctaattgtttgctagtttatagtgttaggatctcactattttgcccaggctggtctcaaacttttggccccagtggatctcccaaagtgttagaattataggcaggagccatggcacccagtaggtatttttaaatttaataaagcttgggtatgtgtcctaacagaatacaccagatgcaaataagaatattgtgtattatcttggttttgatgggagagtattttatgtatctatgaagcctatttggtctataatatggtttggatgtccttgttgtccaaacctcatgctgcaatataaatcctcaatgttgggtgtgggacctggtgggacatatttgggtcatgagggtgaatttctcatgaatggcttggtacatactcttggcaaccaaaaagattagactctatcaattcaaataagagctggttcattaaaagaacatggcttcttcacctcacacttactctgtctcttaccatataatatatccagttattccttaccttccaccatgattttaagcttcctgaaatcctcattagaagcacatgctgacacacacttcttgtacagtctgctgagctgtgagccaaataaaccttttttctttataaattatgcactctcaagtattgctctatatgcaaaataattaatatggtctataatattgtcacagttttctctttcttagtttttatctgaattttctatttattaattgcaaatgggttcttgctgtctacaattattatgttgctatgtatgccttgcttcacttttgtcaatatttgctttatatattttggagccctgatgttatatacacatatacatatagatagataaatattatagttatagattcctgctaaatcaattcactttaccataatataatatcagtcattgtcccatggtcgtacttgacttaaagcatattctgtctaatataattatgaccaccttactcaattgtggttactattttcatggtacataactttttttcattctgttactttcaccctatttgactcaatgctaaaatgagtctcttgtagggagcatagtgtatgctttttaaaaaaccactcaggcattctatatctttttttaatattttcattatgcatatattcatttattattcattttattttattttattttttgagatggagtttcactgttgttacccaggctggagtgcaatggtgcaatctcagctcactgcaatcttcacctcctgggttcaagtgattctcctgcctcagccttccaagtagctgggattacaggcacatgccaccacacctggctaattttttgcatttttagtagagatggggttttcccatgatggccaggctcatcttgaactcctgacctcaggtaacctgcccaccttggcctcccaaactattgggattacaggtgtgagccactgcatccggcctcatgtatttttgagatagggtctcactctgtcaaccaggctgatttgcatggctcacggctgcttgaacctcccaaactcagatgatcctctcatttcagcctctcaagtagctgggttacatgaatgtgccctcacacccagctagctttttttgtatttttcatagagacagagttttgccatgttgcccaggctgatcttgaacttttgggatcaagtaatcggcccaccttggccatccaaagtcctaagattacatttcaaagattacatttcatttcattaagtagtttaatgagagtcctgtatttttgtatctactgaatgatgtggtgacagaaatttgcattgcttttactattagtaaaattagtaacaatgcagtaattatgcaaaagctaatatatgtgctgccttctgttttattggtttactttttcacctttatactcataacaaattattttaattctgtagctttttgatgtgttttgaaatcagaaatggtaatgcctccaacattgttccattttggtagattgttgggtactttattgtctctttagattccatatacttttggatttgctgtttttatttcttcaaaaatgcaatgagacatttgaaaaacattgaattaaatctgtagattaaattgagcagtacagacatcttcacaatattaattatttctttttcagtttgtttttgaggtggagttaaaatcactcacctcgacctcccaaagtgctgggattacaggtgtgagtcactgcacacagcccagttttctgaacaagtgcatgctcaagagtgtgttttctcatttccatatatttgtaaatttatcaattatttatattattgttttatactctaattccatttttgtcatagaaagtaatctataaaatttcagttttaaaaaatgtgttaaggcttcatttttggcctaacttgtggtctatataggagaatgctgtatgagctattgagaaggctgtgtatcctgatgttgttgaggagtgttctctataccttcattagaaataattgttttttactgccttctagtcctctgttcccttattaatattctgtcttgttttattattacagaaaatgaagtattgaaatatcctactataattatattgctctctgtgtgtattcaattttgtatttgctttatatatttgaaactctaatctgagacacacacatgcaaatacatacatgtataaacaaatttgtcatagattcccagtgaaagaatacatatattgtttaaagcccttctttgccttcttgaagttttgacttaaagtacattttataaaatatgacattttcttacttaagatgcagcttgtgtaatattattttgagctcttttgctctaatttggttaatatttacatgaaatttctacttccatcttgccactttcagtctttttttatcattagatctcaactgactcttgtaaaaaggcaagttgaatcttgatttttaaaattttttaataaacctttttatttaaagtatgtctcttgatttggagagataattatatatatttaaatagttttctgcaaaagaaaaacttattttattgttttattttattcttgtgtctttgtctctcattttctctttctgtcttttttttttatctttgtattgacatgctttcagtttcttattttcttttgtgtatctgtacagacattttctaagtggtaccttctgggattacataaaacctctaaaagatccaacaatatatttaaatgtggtaaaaaatcaacttcagtttcatacaaaaatttttcatcattacatctgccttctattttgttattgagtttgccaattatattttttatgtttgtatattcattaacatgtttataataatttctatagtttttatcttttaaattttagagaacaattaaaaatgttttctgcaccattatgataatgttaagaaattccatttttgtgtatgtgcatatctttcccagaaagttacatattttcatatgattatgggttgttttctttcaccatgttattttcagtggaggaaactcaccatctttgatatgtcaggcatatgcagtggcaatatacattctcaggatttggttattttggaagtgcttctttctatttggtagtaaaattgtggtgatgctattattctcacttgaaagctttttttaaattattattttaactttaacaatatcacagtttccttctcacttgcaaaaatttttttgataaattcacttgttatatcatgagactatgcttataaatgacacatcatttttatcttacagctcccaaaattctcttatctgtgatttttgaaattttgcttattatgtgtgtttgttataaatatcttggtgtgtacatttttaaagaaattttccaattatgttttgtatttttatatccacgatttttgttttttgctatttaaatgtttctggttgttattctcatttttctgatcttcagtagttgcctgtgttcctatttaacttactgaatattattcaatttattttattttatttatttattttattattattttctgagacagagtctgtctctgtcacctcaactggagtgcagtggtgcaggctcactgcaacctccatctcccaggttcaagcaattctcttgcctcagcctcctcagtaactgggattataggtgctcacaaccacacttggctatttttttatatttttagtagagataaggtttcaccatgttggccaggctaatcttgaacctctgacctcaaatgatccatccaccttggcctctcaaagtgctgggattacaggtgtgagccatcctgcccaccctattttattatatttttgagacaggcttcctctgttgtccaggctgtagtgcagaggtacaatcttcactcactgatggggccatgttgctctaatattttgtattcattgtaatctttgattgagctttggacattaacaaaaagctacctgttagaatctttaagatataactttattctggcatagtctgaaatcagttgtcatggctagagattttgggaatttctcaaacatgtttttaggatgtgtcttgtctaaaattttgtgtttattgtttagttaaattggcttattcatatttcttcttaataatcagtaatcacttgctagacttattccctgtttggggtagggcagtatctctgcttctgtgacatttatgtttagactcagcagactcaaactgttaatccaacttatatcgtcatttccttcagcattttatgtcatgggagacatttaccagtgtctagaaaagcccctaaaagccaaaaattaagatgtatgtgccaatatttttcctgctttttaaaagaaaccaggatttggcaatttacatttgtgtgtgtgtgtgtgtgtgagagagagagagagagagagagagtctcgccctgttacctatgctgtagttcagaggcatgatcttggtcactacaatatctgccattacagagtctcactctgtcacccaggctggagtgcagtggtatgatgtcagcttactgcaacctctgcctcctgggttcaagcaattctctgcctcagcctcctgagtagctgagattacaagttcctgcaccatgcctgtctagttttttgtgtttttagtagagatgggttctcaccatcttggccaggctgcctttgaactcctgacctcatgatcaacccatgtcagcctcccaaagtgctgagattactggtgtgagccatcacacctgaccagcaatttacttttaaaggcacaatgttatactggagagcaggaagagctctgttgggtataagtaacagactttttttttttcttctatgtggctctttgcattgtactcaccttgggcccttcatacacttaactcatttataaattttttacaaatgtattttgggcagtatgttttttttacatttatatgtccaggaagaaattacagcttgtgatattttgctacatcatcttgtttatgtagtttgtataattttataggttagatttgtaaagtatatttatctgagtctagcaagtgaagtagtgtgtttttatggtttctttcagttttgtgttctcattttaaccaagacctttggccagagcagagcataaaagattctttccaaaaactgatactgagaaggcataaaaaatgtggacatgataatttgcagttaaaaaaaggctgtgaaagtgtggataagtgtaaagtgcacaaaagaggttataatggacttaaccaatgtttgacaactacccaaagcaaaatgtttcaatgtgataaacatgggaaagtctttcatcaattttcaaatacaaacagacataagataagacatactggaaaaaacccttgcaaatttacagaatgtggcaaagcttttaaccggtcctcaacctttactacacataagaaaattcatactggagagaaaccctataaatgtatagaatgtggcaaagccttcaaccggtcctcacaccttactacacataagataattcatactggagagaaacggtacaaatgtgaagactgtggcaaagcctttaaccgctcctctaaccttactacacataagaaaattcatactggagagaaaccctacaaatgtgaagaatgtggcaaggcctttaagcgctcctctatccttactacacataagagaattcatactggagagaaaccctacaaatgtgaagaatgtggcaaagtttttaagtacctttcttccctttctacacataagataattcatactggagagaaaccctacaaatgtgaagaatgtggtaaagccttcaactggtcctcacaccttactacacataagagaattcatactggagagaaaccctacaaatgtgaagaatgtggcaaaggctttaagtactcctctacccttactaaacataaaataatccatactggagagaaaccctacaaatgtgaagaatgtggtgaagcctttaagtactcctgttcccttactgcacataagataattcatactggaaagaaaccttacaaatgtgaagaatgtggcaaagtgtttaagcactcctctcccctttctaaacataagagaattcatactggagagaaaccctacaaatgtgaagaatgtggcaaagccttcagtcggtcctctattcttactacacataagataattcacactggagagaaaccctacgaatgtgaagactgtggcaaagcctttaaccgctcctctaaccttactaaacacaagaaaattcatactggagagaagccttacaaatgtgaagaatgtggcaaggcctttaagtgctcctctattcttactacacataagagaattcatactgcagataaaccctacaaatgtgaagaatgtggcaaagactttaagtactcctctacccttactagacataagaaaattcatactggagggaaaccacacaagtgcaataaatgtggcaaagcctttatttcatcctcaaaccttagtagacatgagataattcatatgggagggaatccctacaaatgtgaaaatgtggcaaagccttagacactcctctacccttactagacataagataattcatactggagagaaaccctatgagtttgatgaatgtgggaaagactttaaccagctatcaacttttactaaatatgagaatttatggaacacaaacactacaaatataaagaatgtgacaaagcttttaggaagttctcaacccttattacacataattcatactggatagaaaccctacacctgtgaagaatgtggcatagcctataacaattttcaatcaattctttttttttttttttgagatgaagtttcatgcttgtcacccaagctggaatacaatgtgatgatctcggatcactgaaacctctgcctcccgggttcaagccattttcctgcctcagcttgtctagtagatgagattatggggggtggagccaagatggctgaataggtacagctcctgtctacagctcccagcctgagcgacgcagaagatgggtgatttctgcatttccgtctgatgtaccaggttcatctcactagggagtgccagacagtggctgcaggacagtgggtgcagtgcactgtgcatgagctgaagcagggcgaggcattgcctcactcacgaagcgcaaggagtcagggagttccctttcctagtcaaagaaaggggtgacagatggcacctggaaaattgggttactcccaccctaatactgcgcaattccaatgggcttaaaaaatggcacaccagattatatcctgcagctggctcagagggtcctatgcccatggagtctcactgattgctagcacagcagtctgagatcaaactgcaaggcagcagcgaggctgggggaggagcgcctgccattgcccaggcttgcttaggtaaagcagctgggaagctagaactgggtggagcccaccacagctcaaggaggcctgcctgcctctgtaggctccacctctggggtcagggcacagacaaaaagacagcagtaacctctgcagacttaaacgtccctgtctgacagctttgaagagagtagtggttctcccagcacgcagctggagatctgagaacgggcagactgcctcctcaagtgggtctctgacccccgagcagcctaactgggaggcacaccccagtaggggcagactgacacttcacacggctgggtactcctcatataaaacttccagaggaccgatcaggcagcagcatttgtggttcatgaaaatccgctgttctacagccactgatgctgatacccaggcaaacagcgtctggagtggacctctagcaaactccaacagacctgcagctgagggtcctgtctgttagaaggaaaactaacaaacagaaaggacatccacaccaaaaacccatctgtacatcaccatcatcaaagaccaaaagtagataaaaccacaaagatggggaaaaaacagagcagaaaaactggaaagtctaaaaagcagagcacctctcctcctccaaaggaacacagttccccaccagcaacagaacaaagctggatggagaatgactttgatgagttgagagaagaaggcttcagacgatcaaactactccgagctacaggaggaaattcaaaccaaaggcaaagaagttaaaaaattagacgaatgtataactagaataaccaatgcagagaaatgcttaaaggagctgatggagctgaaagccaaggatcaagaactacgtgaagaatgcagaagcctcaggagccaatgcgatcaactggaagaaagggtatcagtgatggaagatgaaatgaatgaaatgaagtgagaagggaagtttagagaaaaaaaattaaaaagaaacaaagtctccaagaaatatgggactatgtgaaaagaccaaatctacctctgattggtgtacctgaaagtgagggggagaatggaaccaacttggaaaacactctgcaggatattatccaggagaacttccccaatctagcaaggcaggccaacattcagattcaggaaatacagagaacgccacaaagatactccttgagaagagcaactccaagacacataattgtcagattcaccaaagttgaaatgaaggaaaaaatgttaagggcagccagagagaaaggtcgggttacccacaaagggaagcccatcagactcacagctgacctcttggcagaaactctataagccagaagagagtgggggccaatattcaacattcttaaagaaaagaattttcaacccagaatttcatatccagccaaactaagcttcataagtgaaggagaaataaaatactttacagacaagcaaatgctgagagattttgtcaccaccaggcctgccctaaaagagctcctgaaggaagcactaaacatggaaaggaacaactgataccagccgctgcaaaatcatgccaaaatgtaaagaccatcgagactaggaagaaactgcatgaactaacgagcaaaataaccagctaacatcataatgacagcatcaaattctcacataacaatattagctttaaatgtaaatgggctaaatgctccaattaaaagacacagacaggcaaattggataaatagtcaagacccatcagggtgctgtattcaggaaacccatctcacgtgcagagacacacataggctcaaaataaaaggatggaggaagatctacgaagcaaatggaaaacaaacaaaaaaagaggcaggggttgcaatcctagtctctgataaaacagaatttaaaccaacaaagatcaaaagagacaaggccattatataatggtaaatggatcaattcaacaagaagagataactatcctaaatatatatgcacccaatacaggagcacccagattcataaagcaagtcctgagtgacttacaaagagacttacactcccacacaataataatgggagacttaaacaccccactgtcaacattagatcaatgagacagaaagttaacaaggatatccaggaattgaacacagctctgcaccaagcggacctaatagacatctacagaactctccaccccaaattaacagaatatacatttttttcagcaccacaccacacctattccaaaattgaccacatagttggaagtaaagcactcctcagcaaatgtaaaggaacaaaaattataacaaactgtctctcagaccacagtgcaatcaaactagaactcaggattaagaaactcactcaaaaccgctcaactacttggaaactgaacaacctgctcctgaatgactactgggtacataacgaaatgaaggcaggaataaagatgttctttgaaacccatgagaacaaagacacaacataccagaatctctgggacacattcaaagcagtgtgtagagggaaatttatagcactaaatgcccacaagagaaagcaggaaagatccaaaattaacaccctaacatcacaattaaaagaactagaattgcaagagcaaacacagtcaaaaactagcagaaggcaagaaataactaaaatcagcagaactcaaggaaatagagacacaaaaaaaccttcaaaaaattaatgtatccaggagctggttttttgaaaggatcaacaaaattgatagaccgctagcaagactaatgaagaaaagagagaagaatcaaatagatgcaataaaaaatgataaagggaatatcatcactgatcccacagaaatacaaactaccatcagagaatactacaaacacctctatgcaaataaactagaaaatctagaagaaatggataaattcctcaacacgtacaccctcccaagactaaaccaggaagaagttgaatctctgaatagaccaataacagcctctggggttgaggtgataatcaatagcttaccaaccaaaaagagtccaggaccagatggattcacagccgaattctaccagaggtacaaggaggagctggtactattccttctgaaactattccaatcaatgggaaaagagggaatcctccctaactcattttatgaggccagcatcttcctgttaccaaagctgggcagagacaaaaccaaaaaagagaattttagaccaatatccttgatgaacattgatgtgaaaatcctcaataaaatactggcaaaccgaatccagcagcacatcaaaaagcttatccaccatgatcaagtgggcttcatccctgggatgcaaggctggttcaacatacgcaaatcaataaatgtaatccagcatataaacagaaccaaagacagaaaccacatgattatctcaatagatgcagaaaaggcctttgacaaaattcaacaacacttcgtgctaaaaactctcaataaattaggtattgatggaatgtatctcaaaataataagaactatgacaagcccacagccaatatcatactgaatgggcaaaaactggaagcattccctttgaaaactggcacaagacaggatgccctctctcaccactcctattcaacatattgttggaagttctggccagggcaatgaggcaggagaagaaaataaagggtattcaattaggaaaagaggaagtcaaattgtccctgtttgcagatgacatgattgtatatctagaaaaccccattgtctcagcccaaaatctccttaagctgataggcaacttcagcaaagtctcaggatacaaaatcaatgtacaaaaatcacaaacattcttatacaccaacaacagacaaacagagagccaagtcatgagtgaactcccattcacaattgcttcaaagagaataaaatacctaggaatccaacttacaagggacatgaaggacctcttcaaggagaactacaaaccactgcttaacgaaataaaagaggatgcaaagaaatggaagagcattccatgctcatgggtaggaagaatcaatatcatgaaaatggcccatactgcccaaggtaatttatagattcaatgccatccccatcaagctaccaatgactttcttcacagaattgaaaaacactactttaaagttcatatggaaccaaaaaagagcccacattgccaagtcaatcctaagccaaatgaataaagccggaggcatcacgctacctgacttcaaactatgctacaaggctacataaccaaaatagcatggtactggtaccaaaacagagatatagatcaatagaacagaacagagccctcagaaataatgccacatatctacaactatctgacctttgacaaacctgacaaaaacaagcaatggggaaaggattccctatttaataaatggtgctgggaaaactgtctagccataagtagaaagctgaaactggatcccttccttacaccttatacaaaaattaattcaagatggattaaagacttacatgttagacctaaaaccataaaaaccctagaagaaaacctaggcaataccattcaggacataggcatgggcaaggacttcatgtctaaaacaccaaaagcaatggcaacaaaagccaaaattgacaaatgggatctaattaaactaaagaccttctgcacagcaaaagaaactaccatcagagtcaacaggcaacctacaaaatgggagaaaattttcgcaacctactcatctgacaaagggctaatatccagaatctacaatgaactcaaacaaatttacaggaacaaacaaccccatcaaaaagtcggcaaaggacatgaacagacacttctcaaaagaagacatttatgcagccaaaaaacacatgaaaaaattctcaccatcactggccatcagagaaatgcaaatcaaaaccacaatgagataccatctcacaccagttagaatggcaatcattaaaaagtcatgaaacaacaggtgctggagaggatgtggagaaataggaacacttttacactgttggtgggactgtaaactagttcaaccattgtggaagtcagtgtggcgattcctcagggagctagaactagaaataccatttgacccagccatcccattactgggtatatacccaaaggactataaatcatgctgctataaagacacatgcacacgtatgtttattgcagcactattcacaatagcaaagacttggaaccaagccaaatgtccaacaacgatagactggattaagaaaatgtggcacatatacaccatggaatactatgcagccataaaaatgatgagttcatgtcctttgtagggacatggatgaaactggatatcatcattctcagcaaactatcgcaaggacagaaaaccaaacactgcatgttctcactcataggtggaaattgcacattgagaacacatggacacaggaaggggaacatcacactctggggactgttgtgggttggggggagggggaagggatagcattaggagatatacctaatgctaaatgatgagttaatgggtgcagtacaccaacatggcacatgtatacatatgtaacaaacctgcacattgtgcacatgtaccctaaaacttaaagtacaataataataaaataaaaaaattaaaaaagattacaagtgcctaccaccatgcccagctaattttcatatttttagtagagatgcaattttatcatgtttttcagggtggtctcaaactcctgacctcaggcgatccacctgctttggcctcctaaagtgctggaattacaggcatgaaccatgatgcctggccaccatttcttaattcttaagagatttggtgataattcctgccgaagaagaactctacaaacctaaaaaacatgtgacagtgcttttaccaacacctccaaattctctatgtataacaataattattgtggtgtgaaaccctagaattatatataatgtgacatagcctttatgtggttgccacacttgattgtaggtaagactgcaaaactcctactgtcatactggcaaaactcctacaagtttgaagaatgtggcaaaacatttaatcagttcttaccccttatttcacaggaaagctattatccttgagaaaaattgtacaaatataaggaatatggaaaaaccattaattcctactcacatcttaacataaaaaggttccttttaataaaagcattaaaagtgcaattactgtcaaaaaaatctttcagaatctataagcctttaaaatgaagaaaagtatttattttgaagacaactattacaactataaagggggttatagcgcatttacttgttgcacacatttgtaccagaggaaaacagtgaagcaattgctcaagctttgttcaacatcagggaatttatgttggagattagtcctgcaaatgtaataagtttagaaacactttttttttttcagaaacaacagcttagaaaacaccagagagtttatactaaagtataattttgcagatgcagtaaatataaaaacaattcaaaatagaatgtatataaatgtcagaatttacagtagaataactaaggcactgacacttaagacattacactaaatcagagtgttgagtataaaaactaatccacaactacagtttttagataaatgatttgtatgtaactttaaaaagatttttggaagcattgtaattacattgaaagtacacttgtttccttgaataaaattttttgaaaactgaataatgatataatacagctttcaaattacttcatgctgttaatttattcctgttttattcacatgtgaaagcatgtgatcaattgctgctgcattagagatattagatatttttaaaaattatttggatattatgaccttttctataaaagaataaggacattaaaatgtaagatgcataatgaaaatataagtggagaggttctttgtagtaaacctctattaagtataaggtaaatgttcagagcaatacttttctacattatagtgtcacaaggaaataattatagttaaaagtatattaaaataaaatagtatattattttactaattgtacttttatgtaatgaaatacagtacatttaaaaattgctagggctgggctcaatggcgcatgcctgtaatcccagcacttggggaggtcgaggtgggtggaacacctgaggtcaggagttcgagaccagcctgaccaacatggagaaaccccatctctactaaaaatacaaaaaatacaaaaaatacttaggaggctgaggcaggagaattgcttgaataagggaggcagaggttgtggtgagccaagatcttgccattgcactccaccctggacaaaaagaaaaaaactgcctccaccccccccaaaaaagttagattatgtgtgaacttaattttattattttttaaccatgttaagactactgtgcatttaatgaagcattattatgccactaactttaaacgatcctaccttactcaagggtgaagctacaagatggtaacaatacacaatttggcatatagtggaataacatttctagtaatcactttgcccgtggctttaaactgcaaatgagttaaagaatattgttcccacagattaaatttgtactctattttcttcttggaatttgttatttgtatttgtgcgtatatagtatgtgtatgtatttatgccttatatggcatcttttgactcaggcctacaatatgcagtaattacattagggtaaataaggtgtccgtcacctctagcatttatcctttgtattaccaaaagtgtaattatatgcttttgttcattttaaaatgtacaattaaattgttattgactacaggatttttttatggttataataattatacaaaaatacaaataaaatatgtccaggtgcagtggctcacgcctgtaattccagcactttgggaggccaaggcaggtggaatgcttgaggctaggggttcaagaccagcctggccaacatggtgaaaccccttctctactaaaaatacaaaaattgaccaggcatcttggtgcacacctggaggctgaggcaggagaattgtttgaacccgggaggtggaggttgcagtgagccaaggtcgcaccactacactccagcatagatgacagagtgagacttcatttcaaaaaaaaaagaaatagaaataaagtccatacatttctgagtcctgaaagtttattaataaatatttgttacatagctgtctttgaacatgtggtctctctgcctgcaagcatatagacttttagttttaatttacatagggttaaatatactcatattactctgaagataaaccttaggtgtatgaaaattatgaagcgagtgtttttgtgagtatgagtttgtacatattttcagaaggaaagagcaattattgcaacaaaacaaatcattttaattagatgattaacaaaactaaacaccttgaaaatgctaaaagcaaatctatactttctggtttgtattcaatttattagtgtaaaatgttatggcttatgattcggattctccccggaatctgcttattaaagcacaggcaactttgtctccagaaccaacactcttgaatacaacaataaaacccctcttcaaacaaacaaaaaaatcattttaacacctattttaatgaacattcaaccagaattgaataattgaatatatttttattgttctatgtgtgtgtgaacatataaaatggtgcataaaggaaaaatgagccagaaaaaaatgttagttaagatttgtagtgaataaaactggaaagtagttaattattatatccagttgatatctttgtttatgtagataacaaaagcagcagaaagacttttttttttctttttcaagatggagtcttgctctgtcacccaggctggagtgcagtggcgtgatagcccactgtaacctccacctcctgagttcaagcaattcttgtgcctcagccattttagtagctgggattacaggtgtgtgctaccacgcccgactaattttcatatttttagaagagacagggtttcatcatgttggccagactggtctcaaacagctgacctcatgatctgcctgcctcagcctcccacagtgctgatattacaggtatgagccactgtgacaggcaaaagactattttaaaagtttatttatgtgggtagacaacgttctaagataataccctgaattcccagtctgttacacaccagctgtgtaatactttcttcttgagtgtagaaacgtgtgactgtggtaggaaatcactcatgaaattaggttactcgtgttgcctttgtgtttatcaaaatggagattatcctgcttgtgctaaacttaatcagatgtggttttgagagaaagagacacgtcatagaaaaacacccctgctggcctgaaagtaagtgacttcttggtggaacatgttgtaagctgcttatggtggccacataacaggaaacatgtttgtatattgtcatcattcctgcctcctgcatgttgatttcagtaaggagaataagaggatcttatggcagagggtaaaaaagggactttcattcatgcaagaaataatcacctctcatctgggatagcttaagagaaacaggagaccacaacaggaccacattaatggtaggaaaagggtaccctgagtaaaagtgttcactggcatcatagaacaatatttagtaagctgtagtgaatgatcagcctctgggatactgatagtttaccaacaatgctgaactcattctgttttaatcagcatgtctgcaccattctggtgacccagttttatagtattcattacagaaataccatgaagaccagtgggtaatgtcctagaattgtacttatttcaaaaagcgtacctaattgttttcacatttcaaaaaccttaaaagcaatgaatttataattaacttctaactatagaggattctactatactgtaatacaagattaaactgtaaacaccttaatatgaatattttttgaatgtatgattagttagtagacagtttcttttagagtcacaggacaaaataacaactagagaaaacatttgaaatgggataaaattaaccaaaaccacatcttttcaatggcttggctaaactaaacaccttgaatattgtcatcttttcaatggcttggcgtaattgccatacttacggaaatggccagatgactaatgagaaacaggaagattttggctttgctcaatgattgtttttgaccttttgaaatctaaaatcctggctaaactattcaaagggaatattttataggtggcttcccagggtttccaagtaaatgaaggatggattctctctctgtcacccaggctgcagtgcaatggtgtgttctcatttcactgcaaactctgcctccctggttcaagcgattctcctgcctcagcctcccgagtagctgggataacaggcaaccaccattatgcccggataatttttgtatctttagtagagatgggatttcaccttgttagccaggctcatcttgaacagctgacctcagagtgctgtgactgcaggtatgagccactgtgcccggccagaagaattttgataggcaggaaaatgcacattatatacacacattgctctactctgatttacttcaacactgaaaaattgaagattgtaaatgtagtctcaatttagagtgaattaacaaaagatttgtttttcaaaaaagcaaatggataaaattaatgggtaacagatgccattagctgctaaaaaatagtatgactaaatttagtaagtatctagctatgcaaataacagcccaattaaattaagaccctaataggtgcatgtggaaagcattgatgtgcagtgtggtgcacctccactcagcattttcttctacctttttacagagataccaattcttcctcagttactcagggtccatactgggttagaaatgcttgttctctggtgccataaggaaatagcactcgaacattaattttcttagcaaggccatttttactttttgcggaaagtgtgcactcttcagcagttttgccatcaaagtacatcaaacaaaggagacaaggtcatttataacctgacgcatcctttctactgctgtgtctagttttcattggctgaaacaagacctcaaattctgtatttccccccattgtttagcgacttagaactttttaaaagaggcaaaggcagaggagaatgaaggaaggaggaagtaacttgtggaatgctgagaaaggtaaaaacaccaaataaggaagagtaacaggctatgacctaatgcttgcttggactagtataagcatgccagggcaaatatttaggctaaattgtgggagctaagaagaaagtacattgatttttttattatggctggcagatatttaagaatgttagcacaggactttgaataaattttgcttctaagagaagttactgtttattcctaattagatggggaggaaagtctttgaagaggaacctctactttactttttgcacttggaacagagagtgctgtgttcagagtgattaccgaaaacatggctaatacacatcttccatatgataataaaatgttataaatcttactctgcctcagaaaagcttttactaaaagattatctatggtaatcaatttgagttcatggaaaatttcaatattccacataattcagacagttaaatgtcaatgaaatctcaaaacatttgaataagataaagtcttcttagtgaagaattttatattaccggtagttagaaaaaaaagaaaaccaggctgaatgcggtggctcatgcctgtaatctcagcactttgggaggctgaggcaggtggatcacctatggtctagagctcgagaccagcctgactaacatggtgagacccccatctctactaaaaatacaaaaaattagctgggcatggtggcaggtgcctgtaatcccagctactggggaggctgaggtagaagaattgtgggaaactcggggacagaggttacagtgagccaagatcatgccattgccctccagcctgggcaacaagagcaagactccgtctcaaaaataaaataaaataaaaaccagtaccttaagccaaataacattgtttgacatgggagtagcaaccaaacaagtgctattcatgatttcataataactttttttttttgagacagtctcactaggtcacccaggttggagtgccgtgacatgatcttggctccctgcaacctctaactttctggtttacatgattctcctgcctcagcctccctagtagctgggagtacaggtgcccaccaccatgcccagctaatttattttttttttaagaggagtcactctgtcatcttggctggagtgcagtggcacaatcatggctcactgcaaccttggcctccaggttccagcgattctcctgcctcagcctcttaagaagctgggattacaggcacctgccaccacgcccagctaattttttatatttttagtagagaccagatttcaccatgttgcccaggctggtctcaaactgctgacctcaagcaatccactgccctccacctcccaaactgctgggattacaggcatgagccattgtgctcagcaatttctgtacttttagaagagacagggtttcaccatattggccaggctggtctcaaacttctgacgttgtgatccacccacctcggcctctcaaagtactgggaatacaggcatgaaccaccatgctcggcctgatcattgttaaagtagcaatagcaccttgtgctttcctaggacttgctggcctgtttttcactgatataaagtgaagaaagcattcaaatattgctgagaagtggctgtcctcccagaaaatagctattctcggctgtaccaacattgactaatagtaagaggaagtgaagtggataaaaggcaaatgtgtcttctctgtatcttttttcaaccattggctgaagaacaggagaatgcagaaaattaaaaaaaaaaaatccctgaaagatcatgaagaagctctctttatcagacaaaaaacctcttaggggattttttttgtttcattattgtactgtctgcttctatgagtttaaatttttttttacactttacatagaaataggattatatgagtcaggcacagtggctcatgcctgtaatcccaacactttgagaggccgaggtgggtggatcacttgaggtcaggagtttgaaactagcctggccaacataggaaaactctgtctctacagaaaatataaaaatttgctgggtatggtggcaagtgcctgtaatcccaggtactgaggaagctgaggcaggagaatctcttgaacctggaggcagatgttgcagtgagtggagatggtgccactgcactccagcctgggtgacaagagcaaaactccacctcaaaaaaaaaaaaaaaaggattatgttttctgtttttttccgtgttgacttattttacttagtataatgtctttcaggttcatgaatgttgttgcaaataacaagaccttatttttaagggctgaatagcatttcattgtgtacacataccatattttctttttccattcacctattgatggacacttaggttgatttcataccttagctattgtgagtaatccacttccttccttctattttgattttgtttttgttttgctttgtttgagatggagtctcattctgtcgcccatgctggagtgcagtggcgtgatctctgctcactgcaaactctgcctcccaggttcagtgatactcatgcctaagcctcctgagtagctgaggttacaggtgtaagccaccacaccaggctaatttttgtaattttagtagaggcaggctttcaccatgttcaccaggctgcctttcatttgtttgtatatttctttctcctttcccgtctttatctctagaagtattttaattttaatatataaattatgactgttaaccttcatttctctgtttttgcatactattatggctgattaaaagataagttttttgaaatttcctggataaagtttattacttcattattaagataacttgagacaatatggaaatgaaaatcaacatttgttagtaaaacagaaattagctactggtagtcatttaatctctcacccaacatgaacgctacgtctttgtgtcatctctcccagttgtatgtaagaggctactgagcaaactggtcagcataaaattttgtgaagtttaacatatatgttctgaaaattaagttgatccattaccagaaaagtaggttttctgatgtgtataattttactctatttaaattcttcagaaaaatgaaactgacattatgtaaaagttttttttggaaattaaaaatgcttaagaaatatttatagaaactaaaagtaaaaatagttttagattcctagagaacatctttaaaatacttcaagttatcttctgacactatatatatataaaatatatataatatataaatatatataatatataataaatataatatataaaaataatatataatatataatgtataaaatatatatttacattatatattatatataatatgtaatgtataaaatatatatttacattatatattatatataatatgtaatatttatatgtttatatatttaaatatataattatatttaaattatatatttaaatatataattatatttaaattatatgtttaaatatataattatgtttaaattatgtttaaatatataattatgtttaaattatatgtttaaatatacaattatgtttaaattatatgtttaaatatacagttatgtttaaattatatatttaaatacacagttatgtttaaattatatatttaaatatacagttatgtttaaattatatatttaaatatacagttatgtttaaattatatatttaaatatacagttatgtttaaattatatatttaaatatacagttatgtttaaattatatatttaaatatacagttatgtttaaattatatatttaaatatacagttatgtttaaattatattttaaatatacagttatgtttaaattatattttaaatatacagttatatttaaattatatatttaaatatataatttaaatataaaattatatttaaaatataattatatttatatactacataaatatatgatatatcatatataaatatatataatatcatatatgatatatatctcatatatgtgagatatatgatatatatctcacatatgagatatttatgatatatctcatatatatgagatatttgatatatctcatatatatgagatatttgatatatctcatatatatgagatatatatcatatatgatatatattatatactatatatcatatatgatatatatttatatattatatataatatatagaaatatataatatataatatatatcatatatatgtaaatatatatttaatatatatgtatatttatatatgaatatatattttgtatatgtaaatatatattatatataatatatatttttatataatatataatatattatatatgtttttatataatatataatatattatatatatttttttctttttttgagacaaagtttcactcttgcccaggctggagtgcaatggcacaatctcgcctcactgcaacctccaccttccgggttcaagtgattctcctgcctcagccttgccagtacctgggcttacaggcgcccaccaccacacctggctaatttttacagttttactatagatggggtttcatcatgttggccaggctggtctcgaactcctgacatcaagtaatccctctgccttggccgcccaaagtactgggattacaggcatgagctgctggctgggtcaagtgttgaacttttctgaataaattatctcagctcagataatttaagtcagccaattagcttacctctggggattccaagcagcccattagcacatcccaggagaatccaatcagcaaattagctcagcccagctgattagcccaggtaatttttaagagccagctaacttactccaggtgatattaatcagccagttatctcagctgatgtgaatcttataagccaattagtttagcacaggtgattttaaaccaccgcgtcactcagcccaggtgatttcaatcagtgaatcagcttaacccaggtgatttctatcagccaattaatcaatccaggtgaattcaattagctaattagctcagtccaggtgatcccaatcagccaattatctagcagctgccaattcattaaggcatgcccaaaatggtaaatgtaaatagcccaggcacaccaagaagaaatgcagggccctatatgctaagctggacagtatgtaccatacagctttactgtcagcttatttacaagacctgaaacctgaagctgaaggtttttgtttatataaaccacattgtatggctatgttttattctgttatgctattgaaaaaaacagaaggcaattaattctacatctgcatccttagtatatgctctatattttaaaaagtgggaaaatattttatgtatacattatttacatatacacattcatataagtttgcgtttatgtatctaccaggtgtgtacatatattcatatatatacctaagtatatataaatatatatataatatctgaagctgtaacaatctttgtatttatattcatacagaataaagatgttgactgtggaagtattgataggtattgctacaaacagtaatacaaaacctttcatacatgcataaaatattttccctgtagaatactatttctagaatagtacagaaatagaggaatgctctgatatacatcctgctgcacttaatatattcaaaggaagcactgaactttgttgtgcacttctggatgatacaaattttctaaggccattggagttatttactgccatatcagggttgacttttcttttattgttgtacgtaaggtcagagatgaaccagccccagtccaaaggttctaacctaaatatgagaatacttactctttctctttagaactttcatcaagacaagaactgtgtgtattcccaagagtgtgtgatgtaaaatcacactcttgtctttttgtctttgtggcagaagttgggtatttatggtaagaaaatattagtctaggtctctttttagaagacagatggtgatcatggaagcaaatataatggtacatggtacttggccacatttcaaatgggtgatagtgaacattcgctgaagtgtcacaggtggctctatttgccaggtcaaatctttgtgaggaaggctcagcccactggtgtcaagcatttctggcagtttccagaaagatgaaaagaagctcaccgggctggtttaatgagaccagaattaaaaacacccaggagccacattattaaacacatttttacatttatttaaaaaaatgtggtgtatggcttggtttgaataaatcttcactgagctcagtagctgattgaatttatctaacctgttcggaaagaaaatggaaataacctctgatcaagtttattttataggcttctttctttacatacagatataaaataggtggctcgttaaacatatacacacaaaatgagccacatggttatgtctatgtaatgtttatttctgcatacgactctcaaaaaaaagccacagaaaaaaagtaggtcagaagacatctccatatgctacccctgaagccaagatcaattaaataagtaaatgagcagaaaccgggtgattgcaatcagccaatttgcacagccttggtgatttcaaccagccaaggagctcagtccaggtggatccaatcatccaattatctaaatggtgactgtgactttgtcaagacaggcgccaaatggtgcatgtgaacggaacatgtaccaaatgcagggcgctgaaatactgtcctggacagatgtgttacatgactttattttcagcttatttctgtggacttgcccttgaagatagagctttgttgatatgttccattctgaaatgttatttagctaaagaaggaaaaattgattctacattagcgtctttagagcatgctaaaaggttaaaaatatctcttggggaatatgttttgtatacataaatatttagatagaaatatttatataattctctatgtgggtttttgtcttcctatgtatatatgtagatgtgtcaatctttgtattgatatgaaacgttgtgaatagtgagataaaaagtaacttccagttggatgctgtggctcacacctgtaagcccagcactttgagaggctgaggtgggtggatcacctgaggtcagaagttcaagaatagcctggccaacatggtgaaaccttatctctactaaaaccaaatctacgtctgattgatgtacttgaaagtgatggggagaatggaaccaagctggaaaacactctgcaggatattatacaggctcaaaataaagggatggaggaagatctaccaagcaaatggaaaacaaaaaaaaggcaggggttgcaattctagtctctgataaaacagactttaaaccaacaaagatcaaaagagacaaagaaggccattacataatagtaaagggatcaattcaacaagaagagctaactatcctaaatatatatgcacccaatacaggagtacccagattcataaagcaagcgttagagacctacaaagagacttagactcccacacaataataatgggagactttaacaccccactgtcaacattagacagatcaacgagacagaaagttaacaaggatatccaggaattcaactcagctctgcaccaagcagacctaatagacatctacagaactctccaccccaaatcaacagaatatacattcttcttagcaccacactgcagttattccaaaattgaacacatagttggaagtaaagcactcctcagcaaatgtaaaagaacagaaattataacaaactgtctctcagaccacagtgcaatcaaactagaactcaggattaagaaactcactcaaaaccgctcaactacatggaaactgaacaacctgctcctgaatgactactgggtacataacaaaacaaaggcagaaataaagatgttctttgaaaccaatgagaacaaagacagaacatgccagaatctctgggacacattcaaagcagtgtgtagagggaaatttatagcactaaatgcccacaagagaaagcaggaaagatctaaaattgacacgctaacaccacaattaaaagaactagagaagcaagagcaaacacattcaaaagctagcagaaggcaagaaataactaagatcagaacagaactgaaggaaatagagacacaaaaaacacttcaaaaaaatcaatgaatccaggaggtggttttttgaaaagaccaacaaaattgatagaccactagcaagactaataaagaagaaaacagaagaatcaaatagacgcaataaaaaatgataaaggggatatcaccaccaatcccacaggaatataaactaccatcagagaatactacaaacacctctacgcaaataaacgagagaatatataagaaatggataaattcctcaacacatacaccctcccaagactaaaccgggaagaagttgaatctctgaatagaccagtaacagcctcgggattgaggtgataattaatagcttaccaatcaaaaaaagtccaggaccagatggattcacagctgaattctatcagaggtacaaggaggagctggtactattccttctgaaactcttccaatcaatagaaaaagagggaatcctccctaactcattttatgaggccagcatcaatatgataccaaaacctggcagagacacaacaaaaagagagaattttagaccaatatccctgatgaacatcgatgcaaaaatcctcaataaaatactggcaaactgaatccagcagcacatcaaaaagcttatccaccatgatcaagtgggcttcatccctgggatgcaaggctggttcaacatacacaaatcaataaacataatccagcatataaacagaaccagtaacaaacaccatatgttatctcaataggtgcagaaaaggcctttgacaaaattcaacaaccttcatgctgaaaactcttaataaattaggtattgatgggacatatctcaaaataataagagctatctatgacaaagccacaaccaatatcatactgaatgggcaaaaactggaagcattccctttgaaaactggcacaagacagggttgccctctctcaccactcctattcaacatagtgttggaagttctggccagggcaatcaggcaggagaaggaaataaagggtattcaattaggaaaagaggaagtcaaattgtacctgtttgcagatgacatgattgtatatctagaaaaatcccattgtctcagcccaaaatctccttaagctgataggcaacttcagcaaagtctcaggatacaaaatcaatgtgcaaaaatcacaagtattcttatacacaaataacagacaaacagagagccaagtcatgagtgaactcccattcacaattgcttcaaagagaataaaatacctaggaatccaacttacaagggacgtgaaggacctcttcaaggagaactacaaaccactgctcaacgaaataaaagaggatacaaacaaatggaagaacattccatactcatgggtaggaagaatcaatatcatgaaaatggccatgctgcccaaggtaatttatagattcaatgccatccccatcaagctaccaatgactttcttcacagaattggaaaaaattactttaaagttcatatggaatcaaaaaagagcctgcattgccaagtcaatcctaagcaaaaagaacaaagctggaggcatcacactacctgacttcaaactatcctacagtgctacagtaaccaaaacagcatggtactggtaccaaaacagagatatagaccaacggaacagaacagagccctcagaaataatgccccatatctacaagaatctgatcttttgcaaacctgacaaaaacaagaaatggggaaatgattccctatttaataactggtgctgggaaaactgtctagccatatgcagaaagctgaaactggatcccttccttacaccttatataaaaattaattcaatatggattaaagacttaaatgttagacctagaaccataaaaaccctagaagaaaacctaggcattaccactcaggacataggcatgggcaaggacctcatgtctcaaacaccaaaagtaatggcaacagaagccaaaattgacaaatgggatctaattaaactaaagaccttctgcacagcaaaagaaactaccatcagagtgaacaggcaacctacaaaatgggagaaaattttcgcaacctactcatctgacaaagggctaatatccagaatctacaatgaactcaaacaaatttacaagaaaaaaacaaacaaccccatcaaaaagtgggtgaaggacatgaacagacacttctcaaaagaagacatttatgcagccaaaaaacacatgaaaaaattctcaccatcactggccatcagagaaatgcaaatcaaaaccacaatgagataccatctcacaccagttagaatggcaatcattaaaaagtcatgaaacaacaggtgctggagaggatgtggagaaacaggaacactttcacactgttggtgggactgtaaactagttcaaccattgtggaagtcagtgtggcgattcctcagggatctagaactagaaataccatttgacccagccatcccattactgggtatatacccaaaggactataaatcatgctgctataaagacacatgcacacgtatgtttattgtggcattattcacaatagcaaagacttggaaccaagccaaatgtccaacaatgatagactggattaagaaaatgtggcacatatacaccatgaaatattatgcagctataaaaaatgatgagttcatgtcctttgtagggacatggatgagattggaaatcatcattctcagtaaactattgcaagaacaaaaaaaccaaacaccacatattctcactcataggtgggaattgaacaatgagaacacatggacacaggaaggggaacatcacactctggggactgttgtggggtggggggaggggggagggatagcattggaagatatacctaatgctagatgacgagttagtgggtgctgcgcaccagcatgtcacatgtatagatatgtaactaacctgcacattgtgcacatgtaccctaaaacttaaagtataataataattaattaattaattaattaaattaaatttaagaaagtaaaaaaggaaatgagggaaatatactactaaaaacacataaaacaataacaatataactggcaataacaacttcatttctttaagcaatcattttaaatataaattaattaaactatttaataaaatgaaatgtaatcgtaggactttgtaaggccaaggtaggctgatcacttgatcccaggagttcaagagcagaatgggcagtatggcaaaactctgtctcagcaaagaatacaaaaaaggtagctgggtgtgatggcacatacttgtaatccagctacttgagaggctgaaatgagaggatcatctgagtttgggaggttcgggcagcagtgaacccagcaaatcaacctggttgacagagtgagaccctatctccaaaatacacgaggctgggtgtggtggctcaggcctgtaatcccaacacgttaagatgctgaggtaggccgcctggtctctactaaaaatagaaaaaaattagccaagcatggtggcaggttcctgtaatcccagctacttgggaggctgaggcaggaaaatcgcttgaacctgggaggcagaggttgcagtgagctgagattgcaccattgcacttgtccagtctgggcaacgagcgaaactccatctggaataaaaaagcaaagaatttataaataaatacaattatatgaagaaaaaatagaatgcctgattggtttttttataaagcaaacaatatgctccctacaagagactcattttagcattgattcaagtaggctgaaagtaatagaataaaaaaagtatattccatgaaaatagtaccacaattgagtgaggtggtcataattatattagacataatatgctttaagtcaagtactgccatgagacaatgactgatattatattatgataaagtgagttgatttagcaggaatctataactatttatctatctgcatatgtgtatataacatcagagctttaaaatatataaagcaaatattgacaaaagtgaagcaagacatacataacaacataataattgtagacatcaagaccccatttgcagtaataaatagaaaattaaggtaaaaataagaaacagaaaactaagacattatagactatattaactattttgcatatagaggaatacttgagagtgcataatttataaagaaaaaaggtttatttggctcacagtttggcagactgtataagtgtgtgccagcatctgcttctggtgaggatttcaggaagcttaaaatcatggtggaaggtaaagagtaactggacatattatatgataagagacagagcaagtgtgaggtgaaggtgccagattattttagtgaaccagttttcatttgaattaatagagtgtaaactttttggttaccaagaggttgtacgaagccattcatgagaaattttccccccgtgacaaaaacatgtcccaccaggtcccacaatcaacattgaggatttacattgcagcttgaagtttggagaacatggacgtccaaataatattatgaacgaactaggcttcacagacacatacaaaactctccagtgaaaaccaagataatacacaatattcctatttgcacctgatgcattctgttaggacacagcaagttttattaaatttaaaaatactaactgggtgcagtggctcttgcctataatcctaacactttgtgataccaaggtaagaggatccattggtgccaaatgtttgagactagcctggacaacattgtgagatcctaaaactacaaacaagcaaacaattatccagacatggtagtgcatgtctgtagtcctaactactcagaaaactgaagtgaaaggatctcttgagcccaggaggctgaggctatagtgagccaaaattatgccactgcaccgcagcctgggatgcaagatgttgtctcaaaacaacaacaaattacgttaagaagactaaaattatacattgcgtgttttctaacaaaaactgaatgaaactaggaattaaaagcaaaagtcaaactggcatattcaaaactatgtgaatatgaaacacactcttcaacatattcttgctctgtgtcaaaaaatgtcatttttcaaagatgtcaatccaacctacagttaaaagctacagaacataaacagtgtgatattgacacaaagattaacagatgaaagaacaaaatagagttcagaaatgaacccttctatatatgatcaaatgatcttccacaacgttgccatgagcacaaaacagagaaaaataatctcttcaaaaaatgatgttgaaaactgaatatcaaaactgataaaaaagttggattatttccttgaattaaaatatattttaaataaaatgcttggacataaaaaaactaacaaatcttttagaaaaactacggaaaaaagacatgacattggtcttggcatcattttcttagctacaaaattaaatgcatgagcagcaaatgaaataacagaaaagtttaactacactagacttcaaaatttctgcataccaaaaaacaattcaagagtaacaacatcccttagaaaacgggtgaaaacatttgcaaatcacatgtgaaagaagttaatattcaaaatatataaacaactctttaaacaataaaattgaataacttgatttagaaatggacaaaaaatttttcattagacaagtacacaaatgggaaaaagcatttgaaaggacacaaaaaattactaacttgtaaagaaatgaaaaaaaaaacaaaaaaacaaaaaaaaccactgacaaacaaaatcacctcacacccattaggaggaccactacaaatatttttaaaaacatcaaatctgttgacgatgcaataaaagtgaaacccatgttaattgttggtggaaaacaaagatgcagccattattttagaaagttacaaatgctcctcatttataagtctatatccaaaatatgtaacaaaggccaggtgcagtggctcaagcctgtaatcctagcaatttgggagtccaaggggggcagatcaactgagatcaggagtttgagaccaacctgatcccttctctactaaaaatacaaaaaattagctgggcatcatggtgggaacttgtaaccccagctacttgaaaggctgaagcagaagaattgcttgaaaccaggaggcagaggttgcagttagctgagatctcaccactgtcaacagcctaggcgacagagcaagactccatctgaaaaaaaaaaaaaaaagcaacacaggatatgggaggcatatttgaaaatccattttattgcagcagtattcacaaaagccaaagggccgaagcaataacccagatgtctcttgatttataaacatatcaaaaaatgtaacctatacatacaatagaatattattccaccttcaaaaaaatcttgttacattttaagatgaacattgagaatcttatgtcacctgaattaatctagtaacaaaattatggatactgtaccacttatgtgagatatcttaagtagtcaaaatcataaaaacagaaaatggaaggtttgtcaaaagctggagagagggtaaaatgagaagttgttacttaatgagtactgagttttagttttgcaagatgtaaagtttctagaagtcttttgcataacaatgtaaataaacttaacatgcctgaaatgaaaagcttttttttttttttttttgagacagggtcacccgagctggagtgtagtggcacaattcaatctcccatgtagctgggaccacagcttcacaccaccatacacggctatcattaattttttctttttatagagaggggtctccctatgtttcccaggctggtctcaaacttttgggctccagggatcctcctgtcttggcctcccaaaatcttgggattacagatgagagccacaaccatgcctggccctgaagtatacacatcaataaatttaagatggtaaatattatgttatgtgtttttaaaacaatgtttatagagaaaaactttaaaaaatccagaattataaatctttttggaaattaacttcaaatcacaaaagtgtttctctcacaaaaagaaatatatattaatcattaaacacatggtgaaaataaggctatctccatgactactcagacaagataaaattaccatcgaaaattagctgagagaatatgaaataagccataactaaaatttgggtcatatttataggttagcacacatacacatgtaatccggttgtgatagacatgcgcaatttatttcttagataaaactcatattgacttaaatatacaaacggaattgcaaattgtctaaaattataatacgtaagtataaccaatagacacaataaactgatgttgggaaacctacaccgaggctggactcggtggctcatgactataatcccagcactttgggaggctgaggcaggcgtatcacgaggtcaggagtttgagaccagcctggccaataaggtgaaacactgtctctaataataatacaaaaattagctgggcttggtggcgtgcctgtagtcccagctactcaagaggctgaggcagaagaatggcttaaactcggaaggcagaagttgctgtgagctgagactgtgccactgcactttagcctgggtgacggagagagactccctctcaaaaaaaaaaaaaaagtaataaataaatctacaccggagaaactcactaacatagaacttcaaacaataataagagaaatgtttgctcataaaatctggtatactacattgatgtatcatcaaacaaaatttgtcaggcagggtgtagtgattcatgcctataatctcagcactttgggaggccaagggggacagatcacctgaggtcaagagtttaagaccaccctggctaaagtggtaaaaccacatctctactaaaaatacaaaaattagctgggcatggtggcacatacctgtaataccagctacttgggaggctgaggcacaagaattgcttgaacccgggaggtgaatgttgtagtgagccaagatcacccgacggcaatccagcctgggtgagaaagtgtaattgcttctcaaaaaaaaaacaaaaaaaaaaaactatgtaactgcaatatttagctgttactatgtactcatcatatacaaatattttaaatcattggcatgcattgtgtggcagtaaaatttcagagaatatgcagtataattataaatagaagattctaaagagaaacaataaattagcattttaaagaaactagagttgctttttatgttttaaatatatgctattgttaaacaaaatgaaactgctgtaatccaactttaaaaggaaagaatagccttacgttgttaagtacagaaaaagatatatattttgcagaatatggttaggccctctcatatgtgaaacaaatattaagaaataaactatgttattatttagatatagcctgaaataagtagatgaaaatcctataattcctttttgcctgtatcaaacttaaacttatatgtaaatgttttagtaaatatggagtgcctattaattatctaatttacttgaggcataccatgcaaattctagcatattgtcctaaatatctgaatctaaaattacagaaaaatttgaaatagaaaatagaaagtaaaaatgtataaggagagtgacatcagtaagataaaaagattaaaagtgccctattttcatattcccttacagcaaaaaaagtcagccatccctgacaaaaatgcctttatgagagaacagggcattattgctcacatctataatgacagcttcatggtacattaggttggaaaactgcttcaggtgaggattttgaggccagcctgggttatgtagcaagatgtcatctcccaaataagtgcctctaagagagatgtgagatgcagggacgcagttgtgaaacgatgttaaagcttaagtttgagaaggattctattcggaaggcaggccctcattcatgtgggatactgcaggactcctgttttagctacagaccaggatagggttcacccaacttggttccactgagaattctaaacttactctgtaaccatcccaaactcctcccagccacagtctggcagaggtcctgctattccagatacctggaggaaggtgcccatttacatccatgcaggcaggcctgcagatctgggcctttactggggtcactgaggcagttcaatgactcagtttcagttacccgagccactgtttatggtcagttctccctatatagaaacccacacagttacctgaggaaatgctctctggtactcactgaaagccatactcatcaacatcctgatacaaggtccaccatatgcagaccgaactgcaaaaacttgccctagtgtttgccctatggagcaaagccctgaaggatattcagtctgtccaaaaatgaaatgggaattacaactacccaagcccctgtaacaagccaactaaaggtgaaccctagttcagacccagcagccttgtgaccaagctacaacccctcttcactacaaattcagagggcatctcatcaccctaagggcccaacaaaagatctttaccttctgaaatcagtttatgaaaatttaaagtggtgtttgctccatcaaattcagacacaaataccaaactatattctgtccattgtcaatgcttctactttaatgtagcactggaagtatgtggcagaagaattagtcaaagaaattttaaaaatccattaaaattgaggaaaaataaataaaaaattgctgcttgtagatcatataatcttatatttaaaaacccataaagagtacattcgaagctgtctaaactaatacatacactcagtaaattagcaaaatataaaactaacatacaagcatatgtacggttttatacacttaaactatctgataaaatagaggaagaaaaaaatcttatttactatagcattaaataataaatttctgagaaaaaaattaaccaaggaagtaaaaaatctttactaaaaaaatgaaaaaattagaaaagttataaataaattttaaaatattttatgtctatggattgaaagtataaatattattaaagtgccatattattcaaagtgatctatagattcaataaacttcccattaaaattgcaatggtatctttttgacagtaatgaaaaatacaattctgaaatttacatgaaactataataagctttgaattgccaaagcaatcttgatgaaaagaacagagcagaagtataagcaaaacttatacttttgaagtctatttcaagattatatagtaataaaaacagaatggactgtgcagaagactgagcaagaaaaattcaacagaaactactactctcacacatttcagacctatgcaaaaagagaactttgagaatagttttagtttctcaaaaaaaatcagatatttgtgtccccaaaacactggaaaagaagccagattatgcagcctcttatatgctgtgaagtggactttggctctcactgtgaacttgaagggagctcactgaaagaaaagaagaattcttaaagaatttaaaagcatatgacagaagtgtcactttgtgagagaaaaattaaaacaaaaacaaaaacagctgcccaggactatttcctttggaacacagcttcccaaaacacattttaaggactggctttctctttaaccttgggatctcttatctgtgccatctgttgcattcgttttcactcgcacccaccttggtgtttggcaatcatctcatgtctcttcatagttttttttcttattccagacaggtgatcaggtctggcttagagacaacaataactgttttattaaaaataaataacatgaatctttctcatattctccaattacaagctagtaatgtgctcagcagagaggatgtaatacaatattctggtaaattaataccaaaatactaacttataacagaaatttctaaatatttagaaaatactttcaaactgtaggtttctttttctttattttttaattttttttatttttttgagaccgagtttggctcttgttgcgcaggctgaagtgcaatggtgcgatctcggctcagtgaaacctctgcctcccgggttctaccaattatccagcctcagcctctggagtagctgggatttcacgtgtgtgccaccatgcctggctaattttgtatttttagtagagatggagtttctccatgttggtcgggctggtctcgaactcctgacctcaggtgatcttcctgcctcagcctcacaaagtgttgggattataggcgtgagccactgtgccaggtcctgcacgtaggtttttaaattttactacctgatactactgaatcaaaacttggtgctggcagttagattttcaggtgggagcaaccatattttatgccaaaatttcgggaattaccacaaatttagagtgaagaatacagctcaactcaggaatgtggaaagtttggattaagatgaaatatcttgaagaaattcttttctaaatgaaaaaattctgaagattttctgggaaaaaagcattctgaaactctttgatgcaaagaataaattactaaaaaacactccacaagaaaagataaataaaaccttcagggtatgttacgaattatgtattaaggttatcctcaccaagaaagacaaggtttctgtagttctctaacatcatatccctatataaatttcactgtgcagtatccagacaatgacactccttcagagagaattctatggccacatctctaaattgcaatggcccctgaaacacacacacacacacacacacacacacacacatatttttaccaagtggccgtgggcggagttgttattttgacttaaggtgaaattggaaagtaaagagaactggttcttacttataggactgactaaaattatccaataaaataattttcaacacagaaatatgctctaatgtattctttaactctgagaaagaggagcagcgtaagatccacaacatcattacatatatgatatttttctaggtaacgaagtataaaattaagggattgaacatgaacatgtacatttttgagggcaacatccacctactgggctcaagtgattctcctgcctcagcctcccgaattctgttactacaggcttgtaccaccatgcctggctcattttttttttttttttgaatttttagtacagatggggttgcaccatgttagccaggatggtctcaatctcctgacctcgtggtccaccagcctctcaaagtatcgggattacaggagtgtgccactgcatctggccacaagcattttcttaatcctgctctgcatagagctaatggaacacacagatggagcctcaacattacatgttttccatctttactaaggaccacagtttttcccaagagaaatcttgagtatccacaccttctcatgttcaacagccataaagggaacatttttaatattgcatattggaaacaactgctcagagtttcagagtaagtgagcactcaaatcgagaacgttgaagcaaggcaaatttacttctatacaaggctgcatctcacaggtggagaaatagcaagagcacaattggacaagggaggggaagggggtcttatcccttacaccgctagtccttagtgatgtgtctttctcctattggctagggttagaccgcacagtcttagctaattccaattagctattttaaagagagcaagggtggcgaggtgagtagtttcagcaggaaggatggtcacaaggcatttgactgggggtgactcagaatagagcaggtaactagggatgattcacagcaggtgactaggggtgactcagaacagattaggtgactggggatgagtaaggaccctaaatatgtgagttagaagggggttgcttactgaaactaggggcaaggagacataaagattgaggaatttaaacattaaaatggagaacaaagaacagggaagctgataatactgaaatattggttctttgaagaggacttcagaactcattgtacttaacgattttcctctcttggattttaaaggaagttaagctgaaacctttaaagagatatttactgtatcctacatttcagatcataaattcttgctgagaattctgcatggcatataagaagctacgacatagaaaatgtagagaaagttctggaatataggaaataaatatttttcggagacccttgactatcataagtattttaagaagaactcaaactgagaatagggggtggagccaagatggccgaataggaacagctccagtctacagctcccagcatgagcgacgcagaagacggatttctgtatttccaactgaggtaccgggttcatctcacaggggagtgctggacagtgggtgcagcacacactgtgtgagccaaagcagggcgaggcattgcctcacccaggaagcgcaaggggtcagggaattccctttcctagtcaaagaaaggggtgacagatggcacctggaacattgggtcactcccaccctaatactgtgcttttccaatgggcttcacaaacggcaggccaggagattatatcccacacctggcttggagggccctacacccacggagcctcactcattgctagcacagcagtctgagatcaaactgtaaggcggcagtgaggctgggggaggggtgcccgccattgctcaggcttgagtaggtaaacaaagcagcctggaagctcgaactgggtggagcccaccacagctcaaggaggcctgcctacctctgtaggctcaacctctgggggcaggtcacagacaaacaaaagacagcaataacttctgcagacttaaatgtccctgtgtcacagctttgaggagagtagtggttctcccagcacacagcttgagatctgagaatgggcaaactgcctcctcaagtgggtccctgacccctgagtagcctaactgggaggcaccccccagtagaggcagactgacacctcacatggccggatactcctctgagacaaaacttccagaggaatgatcaggcagcagcatttgtggttcaccaatatccactgttgtgcagccaccgctgctgacacccagccaaacagggtctggagtggacctccagtaaactccaacagacctgcatctgagggtcctgactgttagaaggaaaactaacaaacagaaaggacatccacaccaaaaacccatcggtacgtcaccatcatcaaagaccaaaggtagataaaaacacaaagatggggagaaaacagagcagaaaaaatggaaactctaaatatcagagcacctctcctcctccaaaggaacgcagctcctaaccagcaacagaacaaagctggatggagaatgactttgactaaatgggagaggaaggcttcagaagatcaaaccactccgagctaaaggaggaagtttgaacccatggcaaagaagttaagaactttgaaaaaaaattagatgaatggataactggaataatcaatgcagagaagtccttaaaggacctgatgaagctgaaaaccatagcatgagaactacgtgacgaaggcacaagcctcattaaccaatgcaatcaactggaagaaagggtatcagtgatggaagatgaaatgaatgaaatgaagcatgaagagaagttaagagaaaaaagaataaaaagaaatgaacaaagactacaagaaatatgggactatgtgaaaagaccaaatctacatctgattggtgtacctgaaagtgacggggagaatggaaacaagttggaaagcactctgcaggatattattcaggagaacttccccaacctagcaaggcaggccaacattcaaattcaggaaatacagagaacaccataaagacactccttgagaagagcaactccaagacacataactgtcagattcaccaaagttgaaatgaaggaaaaaatgttaagggcagccagagagaaaggtcaggttacccacaaagggaaacccatcagactaacagctgatctcttggcagaaactctacaggccagaagagagtgggggccaatgttcaacattcttaaagaaaagaattttcaacccagaatttcatatccagccaaattaaccttcataagtgaaggagaaataaaatactttacagacaagcaaatgctgagagattttgtcaccaccaggcctgccctaaaagatctcctgaaagaaacactaaacatggaaaggaacaactggtaccagccaatgcaaaaacatgccaaattgtaaagaccatcaagactgggaagaaactgcatcaactaacgagcaaaataactggctaacatcataatgacaggatcgaattcacacataacaatactaaccttaaatgtaaatgggctaaatactccatttaaaaggcacagactggcaaattggataaaaagtcaagacccatcagtgtgctgtattcaggaaacccatctcatgtgcagagacacacatagactcaaaataaagggatgtaggaagatctaccaagcaaatggacagcaaaaaaaggcgggggttgcaatcctagtttccgataaaacagatttaaaaccaacaaagatcaaaagagacaaagaaagccattacataatggtaaagggatcaattcaacaagaagagctaactatcctaaatatatatgcacccaatacaggagcacccagattcataaagcaaagtccttagtgacctataaagagacttagactcccacacaataataatgggagactttaacaccccactgtcaacattagacagatcaatgagacagaaagttaagaaggatatccaggaattcaactcagctctgcaccaagtggacctaatagacatctacggaactccccaccccacatcaatagaatacacattcttttcagcaccacaccacacctattccaaaattgaccatatagttggaagtaaagcactcctcagcaatgtaaaagaacagaaattataacaaactgtctctcagaccacagtgcaatcaaactagaactcaggattaagaaactcactcaaaactgcaaaactacatggaaactgaacaacctgctcctgaatgactactgggtaaataacgaaatgaaggcagaaataaagatgttctttgaaacccatgagaacaaagacataacatactagaatctctgggacacattcaaagcagtgtgtagagggaaatttatagcactaaatgcccacaagagaaagcaggaaagatctaaaattgacaccctaacatcacaattaaaagaactagagaagcaagagcaaacactttcaaaagctagcagaaggcaagaaatatctaagatcagagcagaactgaaggaaatagagacacaaaaaccccttcaaaaaattaatgaatccaggagctggttttttgaaaagatcaacaaaagtgatagaccactagcacgaccaataaagaagaaaagagagaaaaatcaaatagatgaaataaaaaatgataaaggggatatcaccaccaatcccatagaaatacaaaccaccatcagagaataccataaacacctctaagcaaataaactagaaaatctagaagaaatggataaattcctcaacacatacactctctcaagactaaaccaggaagaagttgaatctctgaatagaccaataacaggctctgaaattgaggcaataattaacagcttaccaaccaaaaaattccaggaccagatggattcacagccgaattctatgagaggtacaaggagaagctgataccattacatctaaaattattctaatcagtagaaaaagagggaatcctccctaactcattttgtgaggccagcatcatcctgataccaaagcctagcagagacacaacaaaaaaagagaattttagaccaatatccttgatgaacattgatgcaaaaatcctcaataaaatactggcaaaccgaatccagcaacacatcaaaaagcttatccaccatgatcaagtgggcttcatccctgggatgcaaggctggttcaacatatgaaaatcaataaatgtaatctagcacataaacagaaccaaagacaaaaaccacatgattatctcaatagatgcagaaaaggccttcaacaaaattcaacaacatttcatactaaaaactctcaataaattaggtattgatgggtcctatctcaaaataataagagttatctatgacaaacccacagccaatatcatactgaatgggcaaaaactggaagcattccctttgaaaactggcacaagacagggatgccctctctcaccactcctactcaacatagtgttggaagttctggccagggcaatgaggcaggagaagggaataaagggtattcaattaggaaaagaggaagtcaaattgtccctgtttgcagatgacatgattgtatatctagaaaaccccatcgtctcagcccaaaatctccttaagctgataagcaacttcagcgaagtctcaggatacaaaatcaatgtgcaaaaatcgcaagcatttttatacaccaataacagacaaacagccaaatcatgagtgaactcccattcacaattgcttcaaagagagtaaaatacctaggaatccaacttacaagggatgtgaaggacctcttcaaggagaactacaaaccactgctcaatgaaataaaagaggatacaaacaaatggaagaacgttccatgctcatgggtgggaagaaccaatatcatgaaaatggccatactgcccaaggtaatttatagattgaatgccatccccatcaagctaccaatgactttcttcacagaattggaaaaagctactttaaagttcatatggaaccaaaaaggagcccacatcgccaagtcaatcctaagccaaaagaacaaagctggaggcatcaccctacctgacttcaaactatactacaaggctacagtaatcaaaacagcattgtactggtaccaaaacagagatatacaccaatggaacagaacagagctctcagaaataatgccacatatctacaactatctgatctttgacaaacctgacaaaaacaagcaatggggaaaggattccctatttaataaatggtgctgggaaaactggctagccttatgtagaaagatgaaactggatcccttacttacaccttatacaaaaattaattcaagatggattaaagacttccatgttagaactaaaaccatgaaaaccctagaagaaaacctaggcaataccattcaagacataggcatgtgcagggacttcatgtctaaaacaccaaaagcaatggcaacaaaagccaaaattgacaaatgggatctaattaaactcaagagcttctgcacagcaaaagaaactaccgtcagagtgaacaggcaacctacagaatgggagaaaatttttgcaacctactcatctgacaaagggctaatatccaaaatctacaatgaactcaagcaaatttacaagaaaaaaacaaacaaccccatcaaaaagtgggtgaaggatatgaacaaacacttctcaaaagaagttatttatgcagccaaagaacatgaaaaaatgctcgtcatcactggccatcagagaaatgcaaatcaaaaccacaatgagataccatcacacaccagttagaatggcgatcattaaaaagtcaggaaacaacaggagttggagaggatgtggagaaacaaggaacacttttacactgttggtgggactgtaaactagttcaaccattgtggaagtcagtgtggcgattcctcagggatctagaactagaaataccatttgacccagcaatcccattactgggtatacacccaaaggactataaatcatgctgctataaagacacatgcacacatatgtttattgcagcactattcacaatagcaaagacttggaaccaagccaaatgtccaacaatgatagactggattaagaaaatgtggcacatatacaccatggaatactatgcagccataaaaaatgatgagttcatgtcctttgtagggacatggatgaagttggaaaccatcattctcagcaaactatcgcaaggacaaaaaaacaaacaccacatgttctcactcatagatgggaatttaacaatgagaacacatggacataggaaggggaacgtcacacaccgggacctattgtgtggtgggggtagggggtaaggatagcattaggagatatacctaatgctaaatgatgagttaatgggtgcagtgcaccagcatgtcacatgtgtacatatgtaacaaacatgcacgttgtgcacatgtaccctaaaacttaaagtataacaaaaaaaaaaaaaaagaagcacttaaactaaactcattagggaggaaaaacacaagtagagaagtaaaggtttgtgaataccaaacgcatggcagtccaggaggcagagtggacactgctcttgatgtgagacatgtttacctgaagaaaagccattttttctctttcttctccttctctggagttccttctcagatgagaccctctgaacaaattacacctgcatcttgagaatatgcctttaaggatgtcagtgccacatatttacctgctagcatgacaacaactggcagaaaaagaaaaagtccagccatttctttcctttaaaacagaagagattcaggaacaatgtgctgctccatgaagataatagtatgtttctcctttcctttcctcaggtgccatcacctgccacagacaccagcaatttcttctacagtaatgcagatatatgccacactgacctgtccctaccaaatccaaacagaacaggacttgtaaccaccctttagtgcaaaagtggaacttaattctcatgactgtattttgaagtgttcatacttgattctggcctcaccttagagtcacatgaggcccttaattaaaacaacctgaatgcttccacccagaggaataaacagaagctgtggggagggcacaagatatttctgcaaattggccatgttgtcctagtgacaagcctgggctgataaccactaagctaagcattttctctcaagctttaacgagcttataaatcacttggtaaatttgaccccactttatgtaatgtgattctgcaggtttgaaaaaggtccataaataggtgttttaaacaagtttcctgtcaatgctgatgttgctcccccttcgctcattattagcattagttagagaaagcaggcacagtacagggttccttacactctgaactcttgtaacaaccaaatacttctggtacaaataaggacaacccatctgcatcctaaagacatattatttgctggctctttaaagttgacagagaaaataggaggcagcaatatctcaatacgtttggatttaaaaacaacatgtacacctgtactaatgcaatgtttattaagcaggtactatgagctcaagagtaggatacagagcactgtgctgggcataacacattatgtgatttaattctgataacaacctgggagctggtactaagggtttaataatttccaggatttagataaagggcccagcatttttatttcttcttgtttctctgtcatcaaaccttttaaaaattgtaaagaataaaagctaaatatagacagatgagagaaatatagaaaggaagagtttaatgtagtgtacagaaaattttattctgtttatgtttactttttttgtgacttgtgtagcaatgactgggtctgtaggaatagaaaacaagttactaaatagaatgtctctgcaagcactggttttaatagaaaatttaaaaactaatacccgacaatacataatttatttttcctatttatctgcttttgggtttcagaaatttgtgagcaccaggtctagaaatgcaacaggattccccagccaaaactctgatcccttctaatcagttctgtgaggcaagacttcagggtaggttcagacctaaataaggcctccaaaaagggttaatctgaacaggtctgtgacaggaggaagaccctatgtagaattctgttctctatggcactacagtacttccagttttgttttttctaagcttacctaaaagaaacttaaatcccagagtttctgtaattttagactcttctagccactatcctgtcaactttatactatatactaatatgcaattacataaatcccttaaagttttctagggtaattttttttggtggggggtatggagtcttgttctgtcacccatgctgcagtgcagtggcatgatcttggctcactgcaacctctgcctccctggttcaggcgattcttttgcctcagcctcctgagtagctcggatgccaggcatgcaccaccatgcctggccaatttttgtattattacaaaaccatatatttgccaagctggtcttgaactcctgacctcgtgatccacccatctcagcctcccaaagtgctggattacaggcatgagccactgcgcccagctttctagggtaattttattagaaaataaatatgtacacgtagcaaggtaaaagaaataaaaattatacagctgggcacaaaggctcatgcctgcaattccagcactttgagaggccaaggcagttggatcgtgatgtcaagagttcaagaccagcttcaccaagatggtgaaacacgatgtcgactaaaaatacaaaaatcagccaggttcagtgggagccacctacaaccccagctactcgggagactgaggcaggagaatcacttgaacccaggagacagagattgcagtgagccgagtttctgctattgcactctagcttgggtgatagagtgagactatctctctctctctctctctctctctctctctctatatatatatatatatatacacacacatacatacacacacatatatatttaataacaattctgttcatgaatatccctacaggtgtagccaacagaagtcacagcaatataaagaaagtggcctaaataaagcccaagattttggacacatctctttgttggaccaaccatatgatgcttaatttaattatttacccagttgctagtctagattaaaagtttctggattgtaggaaccatgacttcttcattttttttttaacgactacatgaaatggaagcaactagtttatctatttgggtctccagatcttttccttgtttattatccaagtaccaggaaactggagaaactgtcatctgtgtatcaaccaaagacacctcttgtatgaggggatgaacaaatacaggatgactcacttctcttacactgagacagaagcagaattaaccactcttgtcagcctgaaacaattctactctggccatcctgaaatgcctcaaacacacctaggtgattgtgagagaattcccagtgacccagggctgatggcccaataataagccaggctggagagactcaggctgattctaaataaaaaatggaactgcctggctgagtgcggtggcttctgcctgtaatcccagaactttgggaggccaaggtgggtagatcacttgaggtcagaagcttgagaccagcctgactaacagggagaaactctgtctctactaaaaatacaaaattagccaggcgtggtagcacatgcctgtaatctcagctactcgggaggctgaggcaggagaatcagttgaacccaggaagtggaggttgcagtgagccgagattgggccattgcattccagcctggggaagaagactgaaactctgtctaaaaaaaaaaagaaaaaaggaaaatgaaactgccttggttgagctccagaacctggatcacctgtcctggtttgctagctcttgtgtaagggaaagaacaaaaatactctactccagtaacacattttacaggtaaatatagttgtggccatggctctgcatatgttgtagcctgataatgggaatgggagcagtgtttcagccccagcttctacttataatggtgacatggaaaaaatactgctgagtttccagcatgagtccagatagagatagctccaaaagttctcactgcgacagcccacctcattcaggcaccatgggatactaatagggcttctgaaacagacaaagcactggagagaaaaacagatctccatctgagcaagattattttgaaagaagaaagttaaaaagatcttaagaaaaagcttagattagatataagattgattatgtcagccagaaaatattcccctaaaagaaatttctctctaaacacccaatgtacatagcatgagaaacatatgagcattatgaaaaaatggggcatattttcagaggaattttatagaagtttcttttccatctctgctgctctctcatgtcatagccattgaatgggggttctatactgaaatacatctgacaacttaacactttttgatgaataaatagaatctgactgtgttcatatagtggaatacattagaaattgcaacatagctaactgaatagttattatggtgtttgggtggccacatcacctgtctttatttatcctgtaatagcagcattccaatttagtgaaataaaagatactaaaattgtgtttagtcataattattcctattgaataaagtaataaacacgtcagactaatatctactgtaacaatttggtagtaaattttcttttgatattagatataaataagtatgaataattttaatgaactagtcataatgtatgtagcatttttaaaaattgtaactatagttagtttaaaacactttatatttcaaaagggtaattaacaatattaaaataaccatttaagtgattcaaagtaattattgtggcttcatattcatactattgtagaaaatactgtttatggctcacacctgtaatcccagcactttgggaggctgagggtgggtggatcacccaaggtcaggagatcaagatcaagctggacaacatggtgagaccccatctctactaaaaatacaaaaacttagccaagcgtggtgatgcaagcctgtattcccagctactcaggaggctgaggcaggagaattgcttgaacccagaggcagtggttgcagtcagctgagatcacaaaactgcactccagcctgtgcaagagagtgagactgtctcaaaaagggggaaaatactgtttaatttatatgaatgcaggttgtctacaaacactacacataactatgctaattgttctgaagtaataaatacaaagcaagataaaactacagactccactgttcagtttatgcactgaactgttcttccttttgctgtataggtacttcagcctgcaaatattagataatcaccgtgtggaaaaggtgacatagaggttcctcttcaaagactttcctccctatctaattaggaataaatagtaacttctcttagaagcaaaatttatttgatgggtccattccaagatggccgaataggaacagctccggtctgcagctcccagtgtgatcgatgcagatgatgggtgatttctgcatttccaactgagcaaatggcacaccaagagattatatcccatgcttggctcagcgggtcccatgcccatggagccttgctcactgcttgtccaagaccaaactgcaaggtggcaagcctggctgggggagtagtgtctgccattgctgatgcttaagtacataaacaaagcagcctggaagctcaaactggttggagcccaccacgggacactgaggccaacctgcctatgtagactccacctctgggggcagggaatagctgaacaaaagggagcagaaatttctgcagacttaaacgtctctgtctgacagctctgaagagagcagtggttctcccagcacagtgtttgagatctcagaatggatagaatgcctcctcaagtgggtccctgacccctatgtagcctaacttggagacagctcccagtaggggctgactgacacctcatacagccgggtgcccctctgagatgaagcttccagaggaaggattagacagcaatatttgctgttctgaaatatttgctgttcggcagcctctgctggtgatacccaggcaaacaggatctggagcggacctccagcaaactccaacagacctgcagctgagggacttgactgttagaaggaaaactaacaaacagaaaggaatggcatcaacatcaactaaaaggacatccacaccaaaaccccatctgtgggtcaccatcatcaaagacaaaggtagataaaaccacaaagatggggagaaagcagagtagaacagctgaaaattctaaaaaccagagcatcccttctcctccaaaggatcaaagctcctcactagcaatggaacaaagcaggatggaaaatgactttaacaagctgacggaagtaggcttcagaaagtcagtaataacaaacttctccgagctaaagaaggacgtttgaatccatcacaaggaagctaaaaaccttgaaaaacgattagatgaatggctaattagaacaaacagtgtagagaagaccttaaatgaccccatggagctgaaaaccatggcaaaagaactacatgacacatgcacaagcttcagtagctgaatcgatcaagtggaagaaaggttatctgtgattgaagatcaaatgaatgacatgaaatgagaagagaagtttagagaaaaaagaataaaaagaaatgaacaaagcctccaagaaatatgggactatgtgaaaagaccaaatctacatttgatttgtgtacctgaaagtgagggggagaatggaaccaagctgaacaacactcttcaggatattatccaggaaaacttccccaatctagcaaggcaggccaacattcaaattcaggaaatacagagaacaccacaaagatactgctcaagaagagcaacctgaagacacatcattggcagattcaccgaagttgaaatgaaagaaaaaaagttaagggcagccagagaaaaaggtcgggttacccacaaagggaaacccatcagactaacagctgatctcttggcagaaactctacaagccagaagaaagcggaggccaatattcaacattcttaaagaaaagaattttcaaaccagaatttcatatccagccagactaagattcataagtgaaggagaaataaaatactttacagacaagcaaatgctgagagcttttttcaccaccaggcctgccctaaaagagctcctgaaggaagcactatacatggaaaggaacaactggtaccagccactgcaaaaacatgccaaattgtaaagaccatcaaggctaggaagaaactgcatcaactaatgagcaaaataaccagctaacatcataatgacaggataaaattcacacataacaatactaaacttaaatgtaaatgggctaaatgctccatttaaaaggcacagactggcaaattggataaagagtcaagacccatcagtgtgctgtattcaggataccagtctcatgtgccgagacacatataagctcgaaataaagggatggagggagatctaccaagaaaatagaaagcaaaaaacagcagggctagcaatcctagtctctgatgaaacatactttaaaccagcaaagatcaaaagagacaaagaaggtcattacataatggtaaaaggatcaattcaacaagaagagctaactatcccaaatatatatgaacccagtacaggagcaccctgattcataaagcaaatcctgagagacctacaaagagacagactcccacaaaataataatgggagattttaacactccactgtcaatattagacagatcaatgagacagaaggttaataaggatatccaggacttcaactcagctctgcaccaagtggacctaatagacatctacagaactctccaccccaaatcaaaagaatatacattcttcttctcagtaccacatcacacttattccaaaattgatcacataattggtagtaaaacactcctcagcaaatgtaaaaaaaagaaatcacaacaaactgtctctcagaccacagtgcaatcaaattagaactcaggattaagaaactcactcaaaaccgcgcaactacatgaaaactgaacaacctgctcctgaatgactactgggtaaataacgaaatgaaggcagaaataaagatgttctttgaaaccaatgagcacaaagacacaatgtatcagaatctctgggacacattcaaagaagtgtgtagagggaaatgtatagcactaaatgcccacaagtgaaagcaggaaagatctaaaattgaaaccctaacatcacaattaaaggaactagagaagccagagtaaacaaattcaaaagctagcagaagacaagaaataactaggatcagagcagaactgaaggagatagagacacaaaaaaaaacccttcaaaaaaatcaatgaatccaggagctggttttttgaaaagatcaacaaaagtgatagacactagcaagactaataaagaagaaaagagagaagaatcaaatagatgcaataaaaaatgataaaggggatatcaccatccatctcacagaaatacaaactacgatcagagaatactataaacacctctatgcaaataaactagaaatggataaattcctcaacacatacactctcccaaaactaaaccaggaagaagttgaatctctgaatagaccaataacaggctctgaaattgaggcaataattaatagcctaccaaccaaaaaaagcccaggaccaggcagattcagagctgaattctaccagaggtacatacaggagttggtaccattccttctgaaactattccaatcaatagaaaaagagggaatcctccctaactcgttttatgacaagagcatcatcctgataccaaagcctggcagagacacaacaaaaaagaattttagaccaatatccctgatgaacatcaatgcaaaaatcctcaataaaatactggcaaaccgaatccagcagtacatcaaaaagcttatccaccatgatcaagttggcttcatccctgggatgcaaggctggttcaacatatccaaatcagtaaacataacccatcacataaatagaaccaaagacaaaaaccccatgattatctcaatagatgcagaaaaggcctttggcaaaattcaacagcacttcatgctaaaaactctcaataaactagatattgatggaatgtatctcaaaataataagagctatttatgacaagcccacagccagtatcatactgagtgggcaaaacctggaaacattccctttgaaaactggcacaagacaggtatgccctctctcacctctcctattcaacatagtgttggaagttctggccagggcaatcaggcaagagaaagaaataaaaggtattcaatcagaaaaagaggaagtcaaaattgtccctgtttggctgggcatggtggctcacacctgtaatcccaacactttgggacaccgaggtgggtggatcacaaggtcaggagatcgagaccattctggctaacatggtgaaaccctatctctactaaaaatacaaaaaaattagccaggcatggtggcaggtgcctgtagtctcagctactcaggaggctgaggcaggagaatggtgtgaacctgggaggcaggtttgcagtgagccaagattgtgccactgcactccagccgggcaatagagactgcgtctcaaaaaaaaaaaaaaaaattgtccctgtttgcagacaacatgattgtatatttagaaaacccattgcctcagcccaaaatgtccttaagctgataagcaacttcagcaaagtctcaggatacaaaatcaatgtgcaaaaatcacaagcattcttatacactaataacagaaaaacatgggtgaactcccattcacagctgctacaaagaggataaaatacctgggaatccaacttataagggatatgaaggacctcttcaaggagaactacaaaccactgctcaaagaaataaaagaggacactaacaaatggaaacacattccatgctcatggataggaagtatcgatatatggtcatcagagaaatgcaagtcaaaaccacaatgagataccatctcacacaatttagaatggtgatcattaaaaagtcaggaaacaacaggtgctggagaggatgtggagaaataggaacgctattacactattggtgggagtgtaaactagttcaaccattgtggaagacagtgtggcaattcctcaaggatccagaactagaaataccatttgacccagcaaccccattactgggtatatacccaagggattatgaatcatgctactataaagacacatgcacatgtatgtttattgtggcactatttgcaatagcaaagacttggaaccaagccaaatgtccatcaatgatagactgaattaagaaaatgtggcacatatacaccatggaatactatgcagccataaataatgatgagttcatgtcctttgtagggacatggatgaagctggaaaccatcattctgagcaaactatcgcaaggacagaacaccaaacattgcatgttctcactcataagtgggaattgaacaatgagaacacttggacactgggggggaaacatcacacaccggggcctgttgtagggtggggggatggaggagggatagcattaggagaaatacctaatgtaaatgacaagttaatgggtgcagcaaaccaacacggcacatgtatacatatgtaacaaacctgcacattgtgcacatgtaccctagaactaaagtataatactaaaaaaagcaaaatttattcaaaaacctgtgctaacgttctcaaatatctgatagctgtaataaagaaatcaatacactttatgttcttaactcccacaatttagctaaatatttcctggacatgcttatactggtccaagcaagcattaggccatagcctgttccttatttgaaggtgtttttacctttctcagcattccacaagttacttcctccttcctttgttctcatctgcctttgcctcttttaaaaagttctaagttgctagccaattgggacaaatacagaatgtgagatcctgttccagcctttggaaactggacacagcagtagggtggatgcttcaggttataaacaaccctgtctcctttgttcagtgtactctcatgacaaaactattaatgagtgtaccctttctgcagaaagtaaaaatggccttgctgataaaattaaacttatgttctagtgctatttcgttatggcaccggggaacaagcatttctaacaattttgttggcccatatggggataccttctcctccaggtgtggtctcccatcctctctcatgaggaagcgtgctcctctgcctcattgcagtggcctcagggataaggaatcaagacccatccagtgtgacaaataaacctggactctcaccaatgcagaaaaaaaacaaaaaacctgaccagtgaccaggagtaaaggattctcacatatcacatgaaccagaaaactctgtgcacagaccgaggtaaaaaaacaccgggagagctgctaaagtatttcctttgtggttgggactaaggaaaaagctgcagggcggtaacacattccttgattaggatataccaaggagagaaatgcaggggtggtaaatcattccttagatgggtctagggaaagaaaaccagggggggctgtgaaatattccttagctgggatatcttggagattaaaaagaggggagaaatccccatttggggggtttgaatctcaaaaagaggtaagaaatccccactgcgggagtggaacctcaaaaagaggtaagaaatccccaatgtggggattgaacctcaaaaagaggtgagaaatccccatggtggggtgaacctcacacaaacctctggtagtaaaaaaaagaattcaaaacttccctttcccctcttcttggggaaagaaaaatgctaagctccattgccaccagtcgctcccctaggggaaagggaaggagaggggggaaatcagcaggtggctgttagaggcaaaagaaagaccacagagaggaaaaagaaactaggagaagacgtcaaagtaaaagagagcaaaaacagtaagcgcagtgccagacagccaggcatgccaagggttaagtccctttccccagcccagctctatgtgaaaaagagggtggggaccagtagcaggagtagagcagagtaggtgaaagaacacaattcttgcaacttgcggcaggcaccttccaagcctgtgggccagtgatggcccagcacccagactgcagccatacaaatcccacccagcctgagaaactaagtgtaggaaaaaagaaagaaaataaaaagggaaatcggaaaaaaaaataaaaaccaggagaaacagatggcagcactttcacagaggtggggcctatgccattgcccagccccgccagagaactcgggagggaaaaaggaaacaggacatgacagagagagagacaaaaaggagcacaaatgagagagagagaaatagagggaaataataagtaagagagagactggaagagagaaatcaaaggaagactcagagggtgaaactaggaaaagaaatagtgtaaaaggaaggcagaaagttaaaacatgttgaagattgtgaaagtcataagaaaaattataaaagggaatttatgagagaaatattatataatttaaaagtaattaggcctcctgaatgtaaaactattcaaaaaaacagtttatgtacaaggtatataagaaaaataaaatatacttttcaccatagaatagtgtgcagccataaaaaaggatgaattcatgtcctttgcaaggacatggaggaagccggaaaccatcattctcagcaaactatcacaaggacagaaaaccaaacactgcatgttctcactcataggtgggaactgaacaatgagaacacttggacacggtcaggggggaacatcacacactggggcctgtcagggggtgggggtctgggggagggatagcattaggagaaatacctaatgtaaatgataagctgatgggtgcagcaaaccaacacggcacatgtatacctatgtaactaacctgcacattgtgcacatttaccctagaagttaaagcataataaaaaacaagtaaataaaagtgagttagaaaaaaataaagaaaaataaatatacttttaataaaaggattataaggaggcatacgaatatggatttttatctacattaaaaggttaaaaaacattttgttttagaggtttaagcaagttttaaaatattaattgtaaaggaaactctgtgtgaaaacatattggctaaagttaaaggggtatcatccagttttcctgtgaactggacattaaaataaaagcacaatagatttttcttaaagcactaacctgctctttaacaaaaattataaaaggttaaaaagagtctataaaaattttaccttatagtcagacattaaaagtgaataaataatgtctacaagattttatttaaattaagtttaacattaatagcacattaatataaaggtaaaatttaacttatctggtataaaatcatacaaaaatcattgtcaaatataaaatgatgtttagctttcctaaggcccgagggcggccggttaagtcacaagggccctcatccccaaggccacaacacgcggggacagtgaaggtcacaagaaggccaagaccttaagagggggcagggccacagcatcccctggacagcgctaagcaggaatggagcgggaggcatcaccatgggtcctcaagccccaggatatgcagcagaaattatatacttaatttatcttccactttcccttccctcaaaactaaaagtcttttaacacaggtaccacccctagaatttccagtacaccagcaccagcctgaaaaccaagtcctcatcagaagccagaaaggaaagaaaaaactcaagccagcctgggaaggaccctatcttatgctgttaactactgagactgccatctgcacagccgagaaacaatggacccaccatacccgagtcaagaaaacatattcctcatcagaatcatgggttaccgtactaggatcaagccctgctaagttaaagtttaaaaaaagcttaattttcatataccttctatattgcttcccttcctttccttattcccttactagctccttttttattaatgttactaagtctgactcacctcagaccattgcctttaatgcttgctctgtcatacattatggaaatgtaaaaaatcaatgacagctagccttttcacacaaatatttatgtcccagtcctctaattgacatagttacccctggcactcatcgttgtaatcacctgtagccaagacgtcaattttctgctcctacagcctggaaaccttgtagtaaatgggactacttcctttaaactactcaggagcaaagttggacttccatgaaaaaggtttgtgcatatctaaaacccctcatctatttcacaaaaagaactaccccttctaactgtcagccttatcaatgaaaccctgtccttctctctatcactacctccaccttaactaactctagacctgcccttagtcgcttctatggtatggggattgacataaatggaaaagaccccctaggtatttttaaaatatgcatcattcccccatcttccccttcttcagtagcctcagttctagatcccacaccggttgctcctacatctaataataaaactagggtgtctattgtaaaaataagagatctaagatagaccttagccatcaagataaaatatcaagatgcaaatgcctggttggaatggattaaatattctgttcagactttttaaaaaagtgattattatgcttgttcacaccataggccagaggcccagattatcccctttccactcagatggtcttcttgtcaaccaaatatggactgtatggggcctctctttcagaaacccattgcttcggataatccatcatgctgagctctctctctgctatttcctgagagtcagcccctgagggcaatccagcttccacctctagatgccaagtttacttcgtgcctctcacagcaaggggaaaatgtggtgttccttggaagcataaaaggatgcaaagacctcaatcctttccaagagcttgaccatcagtccatgcgtagccatccccaagcaaatgtatggttgtactgtggaggacctttactggacgctgccaaataattggagcagtacttgtcctctaatccagttggctaacccattcaccctggcatttcatcaatctaaaaaaagtaaaaacaaaacagtgcaggccaagggaaactccttataaatcctttaatcctcaggtttacgtaaatgctattaaggtcctgtgagaagtgccaaataagtttaaagcacaaaatcaaatagctacaaaatttaaatccacgttgttctggtaggtaactataaataaaaaaagttaactaaatacactatatctattacaatcagcaacaattcacaaattgcactagggacgccatcaaggggatagctaagcaattaggacgtaccagccggatggcctagaataataaaatagctttaaatataacactagcaaacaatctaagctgatcccggttgacttagacccaaactttttccaaatagggtaaatgcgcgatttgcgagaaagggagaagagggaagaagaagcggtgtggttgatttacaacttttacaacttatcaccaggaagttgagtctttgaaaaggatctttgttgtcctaacaaccccttaccccaagtgatccacccacctgggcctcccaaaatgctgggattaaaggagtgagccactgtgcctggccccacaaatttttaataggagaaaagagaagctgtgaaccccatggatcaaagctcttcccattcatgaacctgcaccctgacgcaagattctcccctgatgaccctcccatggtccctgcacaatctgggagagacgccgtgctgtgggtgcagagctgcccagagagggctccaggccagtgcacagtcactgaacagggaagagactggatgcccaggggcctgcctgtcagcggagccgccatcttacggctgaacgggactgaggctgagctggacaaggacacctcagggcgcagattgtggagctgacttcggggaggcctgaatcccaccacagccacttcccactgattccaaccagtccctcccctctcttgggatgtccaattggcaccctcaccatttctaggcttccagaaggtcccagcatcttagctgtggatctcccaataccggcaggacacagagccacagaggctgggcctctaggagcagaggacacagaggactgaagacgagacctggagctcctgctgcagcaagagacaaagtccgcgccaaacccagaagttgtcctgttctctccagctgggtgtctgattggacggtttccagctcagagttcctgattggataatgcttaaggtcccgccccctcaggccttgagtgacagaagatgtgatcaggtgctgggctgagtgaagaaagagcaacagcctaagctgcagccttttcaggcagggcttcctccctgagctgagccaggcccaccccagaacatgagaaaattctgtctctttttcactctcggtctttttgaatatattcaaaaggtgaacagaagtactttgctgtcatattaataatacataaaatttttgttcaagagaaaatcaacttttactttggtaatagcgtattatcaatactaaagctaattttaataaaaccttaaaaataaatcaaatttgtcatttttgacctcgagatttacatatatattttgcattctcttgtaatttttttatctttttatattttctttttctctacattctttttattttttttctatttgaaacaaccattaagtaatttcaaaccgttataggagatagaaagaaatcatttagggccagatgcagtggtgcacacctgtaatcccagcactttgggaggccaaggtgggcagatcacttgaggtcagaagttcgagaccagtctagccaacgtggttaaacccaatctctactaaaaatgcaaaaaattagccaggcacggtggtgcacacctgtagtcccagatgctccggaggctgaggcaggagaatcgcttgaacccaggaggcagaggttgtgtgacagcccaaggggttccccttgccctttgcccagagagagctgattcatcaagacagaggaatttgtggaggaaaaattaaatattaaatttgaactcaattaaacatggacacaaaaaatagacaccaagtcctgaaacaggttatgtgagcccccttgaggtgttcatcctgcactgttttggagaaatctctatttcagtctattcctacacattagttattgaaaaacaatagacgatcacaagaaaacaagttgacctttttgtgttccttgagctcagtcgcaaagggccctcatgactgggcctcataccaaacaactcattacaaaaagagctagggccccagaccacaccgaagcttcaggagacctctccttatctgtgcaaggatggatgaccaactcttgagcccaaggtgttgcttcccagtctggtggtgaatcctccatagtctgatgagtgtggtgttcaactctggagtccagcctgttgcttcttggtctggtggtgaatcctccatagtctggtgtggaggcaaagttaaatagcaaatttaaactatatgaatgtggacacaaacagtggtcaccaagtcctggaacaagttgtgtgagcctattgaggtgttcattcagtgctgttttggagaaatctctatttcaatgtattcctctacattcgttattgaaatcaatagacaatcgcaaaaataagttgacctccttgagcccagttgcgaagggccctcatgactgtcacacgtgtccgtgtgaagagaccaccaacaggctttgtgtgagcaataaggctgtttattcacttgggtgcaagtgggctgagtctgaagagagtcagcgaatggagatggggaaggggttgcttcataggagttgggtaggtaatggaaaattacagtaaaaggtggttattatctattgttagcagaggagggggtcacaaggtacatggtgggtagatcataagactcactgtccagaagaagaatgtcacaaggtcgattgatcagttaaggtagggcagggacaagtcacaatggtgtaacggtgtaacgttggttaatcagttgaggcaggaactagctcttttacttgttttgtgttttttcagctgccccagatttcttggctcctgcaggccacctggatgtgtatgtgcaggtcacaggggttacaatggctgagctttggctcaaaggcctgacattcctgtctttttatttataaaatataaagttacaagataagataaagaaaatgtaagtttttactgaggataattggggtaggggtgaagtttctcagggctgcttcaggcatgacttaggggtggtgtgaacacctaaagaaaatgtaattttatagtgagttggtctagaaagtttttgggtacaattctgtgtggcaaacaaggcatcagctagcatatttttgagcttggaattgtcctaatatagtaaattctctaaaaaatcgtaattaagcataatagctttaaggtaggtggcagtgagtttttaggccaaggtaagaataatgttttatatagtaaagctttttgtctccattttccatcctacaaataggatccctagagtgaagccaaaagtctattatattacctttttcctaaaggtgtgagtggagttttgaatggaagagttcaatagtcctgattgcagaccttatacaggaaagataataagtacaatagtccctgtatcctggaataagttggggctggcaaagagagaaatgtcctaggccttctaacaaccaacgacagaccatatgttgtcctggatgttcacctgaatgccagatatgtggaactagtcctgtatatgcatattgctggtaatttttatatgagtaggcctgaggacaccatgggtgaggatttgacacctgtcaatccaggcattttagatttttaatccagagatctttgattttgggggtggggaaaatcttggaggacaaggcctgaagaaagttgtttttagagacaacaggtcctaagagattagcgtttagaggactgggtgaagcaggcctggaagtatgtttggacagccatttggaaggggtgttgcatggaagcttggtcttgtctggatgctgccaggagttcatcattgacttagtcttaaaggtgagaaggtgagaaggagtataaagatgagaaggagtgagaaggagtataataggtgagaaggtgagaaggagtataacaggatgaggaatagaagtttaggctgtggggcgattttagggtacatgatagtactgtggggttgttagaagcagcaactgccatatggaatgattggtgatggcctggatgcagttttgtatgaattgagagactaaacgaaagacctttcactgtcacacactcattttcacagtaagaacctgttcgctgtcatccaatcattcacaacagtgggaacaagttcactgtcacccacttgtttacagcagtaaaaacctgttcactgtcagccatgcagtcaccacattggtaacctgttactgttaaacactcattcaacatattgggaaccatttcactatcacaaacacattcaacaccctgagaacctgttcactgtcacttactcattcaccacagtgagtacctgttcactgttacccactcattcaccacagtgggaacctcttcactgtcagccactcactcatcatagaggaaacctgttcactgtcatccactctttcaccacagtggatacctgttcactgtcacccacaaattcacaacagtgggaatctgttcactgtcagacactcattcatcacaatgggaacctattcactctcacccactcattcatctcagtggaaacctgttcactgtcagccactcactcatcacagtgggaaactcttcactgtcacccactcattcaccacagtgggaacgtgttcactgtcattcactcattcatcacagtggtaatgtgttcactgtcacccatcccatcattacagcaggaacctgatcactgtcatctactcattcatcacagtgggaaccaattcactgtcagccactaattcaccacattggtaacctgtttcctgtcagccactcattcaccacagtgggaaccagttcactgtcatcccctcatttacagcagtagaaacctgttcactatcagccactcagtcagaacagtgtgaaccagtttactgtcagccacaccctcatcagactgggaacttgttcaccctaacccactcatttatcacagtgggaacctgttcactatcacccactcattcaccacagttggaacctcttctctgtcacccactcacacatcacagtgggaagctgttcattgtcgaccaccccttcattgcaagaggaacatttaactgtcacccactcattcttcacagtgagaaccagtttactgtcacctgatcattcaccatagtgagaaccagttaactgtcacccactcatttgctgcagtaaaaaccggttcactatcagccactcagtcaccacattgggaaactctttactgtaaattactcattcactgcagtgggacccagttcactttcacccacacattcatcacagtgagaacctcttcacagtcacccactcactcaacatagggggtacctgttcactgtcttccactcattcatcacagtgggaacctgttcactgtcccccacatattcattacattctgggaacctgttcactatcacccactcattcatcacagtgtgaacatgttcactgttgcccacttactcaccacactgggaacttgttcactgtcacccactcaatcatcaaagttggaacctgttcactttcactgacaaattcaccacagtgggaaccagttcactcccacacacttattcaccacagtgggaacctgactactgtcacccactcatttatcaaattgggaacctgctaactgtcacccactcattcattacaggaggaacctgtacactgtcacccacttattcattacaggaggaacctgtacactgtcacccactcagtctacacagtgggaatctgttcattatcaaccactcattcacaactgtggaaacctgttcacggtcacccactcgttcacctcagtagaaacctgttcactgtcaccactcactcactcactacaatgaaaacctgttgtcagccactcattcatcagagtgggtacctgtcactgtaacccactcattcattactggaggaacctgatcactgtcactcactcattcaccacagtgaaaatctcttcactgtcagccactcattcatcacagtgggatcctgttcactgtcacccactctgtcctcacagtgggaatatgtacactgtcaccaactcactcatcactgtgggaacctgttcactctcacccactcatttacctcagtgggaacctgttcattgtcacccactcaatcatcacagtgggaactttttcactgtcatccactcactcttcacagagggaacctgttcacagtcagccactcactaaaaacactgggaacctgttcactgtcaccaactcactcatcacagtgtgaaccttttccctgtcactcactcattcatcacattcaaaacctgttcactgtcacccactcattcatcacagtgagaacctgttcactgtcacccacacagtcctcacagtgggaacctattcattgtcacccactcattcattacaatgggaacccgttgtaattcactctcacccactcatttaccccagtgggagcctgttcagggtcacccactcactcatcacagtgtgaacctgttcactttcacccactcctttctcacagtgggaacctgctcactgtcacccactaattcatcatagtgggaacccgttcactgtcacctactcactcatcatagtgggaaaaaggacacttttacacaaacattcactacagtaggaacctgttcactatcaacaactcactcatcactgtgggaacctgttcactctgacccactcatccatcacagaggtagcctatttgctgtcacccactcattcatcacagtgagaaccagttcactctcactctctcattcaccaaagtgagaacatcatcactgtcacccactcactcatctcagtgggaacctgttcactgtcagccactcattcctcacagtaggtacctgttcactgtcacccaataattcattacaggaggaaactgatcactgtcacttatgcgttcaccactatagaaacctgttcactgtcacacactcattcaccccagtgggaacatggtcactgtcagccactcattcaccattctgggaacccgttcactgtcacccactcactcacccagggggaacctgttcactgtcgcacacttcctcatcacagtgggaaactgttaactgtcagccactcattcatcatagtgggaacctgttcaatgtcagccactcattcaccacagtgggaacctgttcactctcacaaactcactcaccagagcagtaacctgtttactgtcagccactcattcaccacaacaggaacctgttcactctcacccaattactcatcacagtaggaacctattcactgtcacccactcattcatcacagatggaacctgttcactctcaaccactccttcaccaccttgggaacctgttcaatgtcacccactcatcatcagagtgtgaacttgttaactgtcagccacacattccccatagtgggaaccagttcactttcattcagtcgttcacggcagtagaaacctgttcactgtcacccacttatttatcactgtgggatcctgttcactgtcagacactgattaatcacagtaggtaactgttcactgtcattcactcattcattacaggaggaacgtgatcaccatccaccactggttcacgacagtagaaacctgttaactctcacccactcattcaccacagtggaaacctgttcactgtcagccactcatttaccatagtggaaacctgttccctgtcaccctgtcactcaccacattaggaagcggttcactgtcacccactcagtcatcacagtgggaacctgtttactgtcacccactcaatcatcacagtggaaacctgttcactctcacccaaccattaaccacagtgggaacctgctcactgtcacgcactaatttatcactgttcactatcacacacacattcaccggagtagaaacttgtcccgtcacccactcactcatcacaatgtgaacatgttcactgttagccacccattcatcacaatgggtacatgttcactgtcacccactctttcattacaggagaaacctgatcactctcatgcactcatttaccacagtagaaacctgttcactgtcactcaatcactcaccacagtggaaatctgttcactgtcagccactcattcatcactgtgggaacctgtttactatcagctactctaccaccacagtgggaaactgttcactgtcacccactcactagtcacagtgaaaacccgttaactgtcattcactcactcatcacagtaggaaactgttcactgtcagccactcattaaccacagtgggaacttgttcactgtcacgtaataaatcatcacagtgcgaaactcttcactctcacaaactcattcaccacagtggaaacctgttcactgtcacacactcgttcatcacagtgggaacctgtttactgtcacccactcattcattacaggaggagcctcttcactgtcagcccctcattcatcacattgggaagctattcactgtcagccactcactcaccatagtgggaacctttttaatgtcaccaacatgttctccgcagtagaaacctgttcactgttactcatttactcatcacagtgggaacatgttcactgtcatacccttattcatcgcagaggaaagctgttcactatcaggcactcattcaccagagtagaaacctattgactcactcacacactcatcacagtgagaacttgttcattgtcagccactcatacatgacagtggacagctgttcactgtcacacactcattcactacaggaggtaccccattactgtcacccactcattcaccacagtagaaaccggttcactggcacccattcattcaccacagtgggaaactgttcactctcaaccactcatttattacagtgggaaactcttcactgtcaaccactcattcagcacagtgggaaactgttcactgtcacccacttattcaccacagtaagaccctgttcactgtcacacacgcattcatcatagtacaagcctgttccctgtcacccactcattcatctaagttgggacctctttactccaaccctcacattcaccacagtgggaacctgttcactgtcacacactcattaatcacagtggaaacctgttcattgtcacgcactcatttattacaggagaaattggttcattgtcacccacttattcatcacagtgggaacttgttcatgttagccactgattcacaacagtgggaaactgttcactgtcacccactcgttcactgcagtagaaaactttccactgtcacccactcattcatcacagtgggaaactcttcactgtcagccacttattcaccacagtggaaacctgttcactgtcacccatgcattcactgcagtataaaactgtccactgtcacccactcactcatcacagtgtgaaaatgttcactgtcagccagtcattcatcacagtgggtacctgttcactgtcacccactcattcattacaggataaatctgataactctcacccactcattcaccccagtagaaatctgttcactgtcatccactcatttaacacagtgggaacctgttcactgtcagtcattcattcatcgcagtgggatcctgttaactgtgagccactcattcaccacagtgggaaccagttcagtgtcagccactcattcaacacagtgggaccctgttcactgtcacccacgcattcatcacagtggaagcctgttcactgtcacccactcattcattacaggaggaacctattcactgtcacccgctctgtctttaaagtggaaacctcttcactataatccacacattcaccacagtggtaacctgctcactgttacccacttattctttacaggaggaacctgttcaccttcagccactcgttttcacagtgggaacatgttcactgtcagccagtcattcaccaagttgggaaccagtttactgacacccactcatttgccacagtagaaacctgttcactgtcagcctctcagtcaccacattaagaacctgcttacagtcagcaactcactcatcacagtgggaacctgttcactgtcacccactcatttctcacactgggagcgtgttcattgtcagtcacacatttaccacagtggttacctcttctctctcagccacttattcaccacagtgaaaacctgttcactatcacccactcactcttcacaatgggaacctgttcactgtcacccactcactcatcacagagggaacgtcttcactgttacccacttattcaccacagtgggaacctgttcactctcagccgctccctcattacattgggaatctgttggatgtaaccaacttattcattacaggaggaatctattaactgtcacccactcattcatcacagaggaaacctgcttactgtcacccattcattcatcacactggcaacctattcattgtcaccactcactcatcacagtgggaacctgttcaatgtcatccactcattcatcacagtggaaacgtcttcacagtcacccaataattcattacaggaggaatttgttcactgtcactcgctcattcttcacagtttgaaacttttcactgtctctcctttttcatcacactaggaaactgttcactgtcagttactaattcaccacagtgggaaactgttccctgtcaggcactcactcaccacagtgctatcctgttcagtgtcacccactcactcatcacagtgggaacctgttcactggcacccaatcattcatcacagtgtgaacctgtacactctcatccactcattcctgacagttggaacctgttgactgttacacactcatcacagttggaacctgttcgctctcacccactcaccacagtggaaacctgttcactctcacccactaacttatcacagtaggaagctgttcacttgaacccaatcattcatcacagtggggaccttttcactcccagtcatttatgacagtgggaacctgttcactgtcaccaatgcattcattacagtgggaacttattcctgtcacccactcattccttacaggagaaacttcttcactgttacccactcattcattacagtgggaacctgttcactgtcagccactctttcaccacagtgggaaactgttcactgtcacccactcattcaccacagtagaaatctgctcactgtcacttactcactcatcaagtgagaacctgttcactgtcacccacccattcaccacagtagaaacctgctcactgtcacttactcatcaggcgagaacctgttcactgtcccccactcattcatcacagtgggtacctgttcattgtcacccattcattcattatgggaggaacctgatcctgtcaaccactcattaatcacagtagaagccagttcactgtcaccaactcactcaccacagtgggaacctgttcactgtcagccactcattcatcacagtgggaaacagttctctttcagccactcaatcaccacagtgagaacaatttcactgtcaccccctcattcacagcattaaaaacttgttcactatcagccagtctgtcaccagagtgggaacttgtctactgtcagcgactcactcatcacagtgggaacccactcactgtcactcacttattaatcacagtgggaacctgttcaatgtcacccacttattcatcacaggggaacctgttcactttcacttaatcattacagaaggaacctgttcactgacaccaacacattcatcacagtggaacctgttcactgtcacccactcactccccaacgtggttacctcttcacagtcacccactcaatcattacattgggattctgtttactgtcacccattcattcattgaaaaaagaacctgttcactgtcagccgctcattcatcacagtgggaacccgttcactgtcaggcactcattcaccaaagttaaccgtttccctgtcacccactcgttctccgaaacagaaatttgttccctgtcacccactcactcatcccagggagaacctgttcacagacagccactcattcctcctagtgggtacctcttcactgtcacccactcattcattacaggaggaacctgataactgtcactgacctgttcactagagtaggaaccttttcacagtcagtcactcattcatcatagtgggaacctgttttccatcagccactcactcaccacagcaggaaccatttcactgtcacctactcattcatcgctgtagaaaccttttcactgtcagccacgcagtcatcagagtggaatctgtttactgtcagtcacttagtcatcacagtgggaacctgttcattgtcattcactcattcatcactgtgggaacctgttgaatgtcacccattcattctccacagtgggaaccacaacactgccatccactcattaatcacattgagaacctgttcactgtcaccaagtcattcattacaggaggaacctgttcactgtcacccgctaattcttcacagtgaaaaccaattccatatcacacactcactcaccgcagtgggagtctcttcagtgtcacccattcacttatcaaagtgggaacctcttcactcttacccactcatttaccacggtgagaacctgttcattgtcacccactcattcatcacagtgggatcctgttcactgtcacccacccattcattacgggaagagcctgttcactgtcacttattcattcatcagagtgggaaactgttcactgtcagcaactcattcattacagtgggaacatgttcactctcacccactcattcactacagcagaaacctgttcagttaccttctcactcatcccagtggaaatgtcttcattgtcagccactcattcatcacagtggatacctgttcacagtcaccttctccttcattacaagagaaacctgatcactgtcacccactcgttcatcacagtagaaatatattcactgtcaccatctaattcaccacagtgggaacctgttccctgacagccactcattccacagtgggaaactgttcactctcacccactcattcactacagtgggaatctgttcactgtcacccactcattcactacagtgagatcctgttcactcacatgcactcactcatcacagtgggagcctgttcactatcagccacagtgggaacttgattactctcaccaactctttcaccacagtgggaaactgttcactctcatccactcatttaccacatcaggaacctgttgattgtcacccactcattcatcacagtaggaaactgttcactgtcacacactcatttatcacagggggaacatggtcactctcactcattcattcaccacagtggagacctgttcactgtcacccactcattcactacagtgagatcctgttcactcacacgcactcactcatcacagtggcaaccgattcactctaaaccactcattcaccacagtgcgaattcgttcagtgtcagccaatcacgcatcacagtggtaccctgttcactgtcgggttgtcattcaccagagcgggaatctgttcactctcacccactcattcaccatatcgggaacctgttgattttcacccactcattcatcacagtaggaacctgttcactgtcacacactcatttatcacagtgggaaactgttcactctcattcactcaccagagtgggaacctgttcactctcacaaactattccaccaaagtgggaacctgttcactctcacccactcattcaccacatcgggaacctcttgtcatccactcattcatcacagtaggaacctgtttactgtcacacactcatttatcactgtgggaacctgttcactctcactctctcactcatcacagtggaaacctgttaactctcagccactcattcaccacattggaaacctattcactgtcacccactcattcatcacagtgggaacctgttaactgtcacccacccttcattacagaaggaacctgttcactgtcacccactcatttatctccagtgggaacctgctcactgtcagccactcattcatcacaatgggaacctgctcactgtcacccactcattcatcacagtggaaacttgttcactctcactcacacattcatcagattgggaacctattcactggcacccactcactcatcatagtaggaacctgctcagtgtcacccactcactcacaagtgtgaaaacctgttcactgtcagtccatcattcatcacattgggaacctgtaaactgtcagctactcattcatcacagtgggaaccttttcactgtcacccactcattcatcacactggcaagctattcattgtcatccactcactcatcacagtggaaagctgttcactgtcatccaatcactcatcatagtgggaacctgttcactctcagccactcattcaccacagtgggaacctattcactctgacccactcagtcaccatgtggtaatctgttgactgtcacccactcattcatcacagtgggaaccttttcactgtcattcactgattcatcacagtgggaacctgttcactctcacatactcactagtcacgttttgaacatgtgcactgtaagccactcgttcatcacattgagaacctgttcactctcacccacttattcaacacagtgggaacctgttcattgtcacccacacattcattacaggaagaacttgttaacagtaacacactctttcatcacagtgggaaactgttcactgtcagccattcattcaccacagtggtaacctgcttactgtcagccactcactcaccgcagtgaaaacctgttcactgtcacccacctgatgacctgagtagaaacttgtttacttgcagtcactcattcaccacagtgggaaatttcattgtcacccactcattctcaaaagtgggaaccagttcgctgtcacctacttgttcaccgcagtcgaaacctgttcatggtcagccccatggtgatgacagtgggaacctgtttactttcagccactcattcaacaaagcaggaaccagttctttgtcacccactcattcatcacagtgagaacgtgttcactgtcatccgctcattcatcacagtgggaactagttcactgtcaaccactcactcatctcagtgggaacctgttcactgtcattcactcattcatcacagtgagaacatcctgtatttcagccactcattctccactgtgggaacaagttcactgtcacccactcattcaccttagtaggaacctgttcactatcagccactcagtcaccacagtgggaaccattttactgtcagccagtcactcatcatagtgggaacctgctcactgtcactttctcattcttccctgcgggaacctgtttactgtcacccactgattcaccacagtgggaacctgttcactgtcactcactcattcattacagtggaaaactgttccctgtcacccacgcactcattacatgaggaacttgttcactgtcacccactcattcatcacagttggaatctgttcactctcacctatgcattcaccacagtgggaaaattttaactgttacccactcattcatcaaagtgaaaacctgttcactctcacccactcatttacgacaatgggaaccagctcactgtcacccacctgttcatcacaatgggaacctgttcactgtcaaacactcatttattgcaggaagaacctgttcactgtcacacactctttcattacactgggaacctgttcactgtcacgcactcattcattagagttggaacctggtgactgtaacacacacattaattgcagtgggaacttattcactgtcagtcactaatttgccacagtgggaaccagttcactgtcacccactagttaaccacagtagaaacctgttaacagtcagcaactcactcatcacagtgggaagctgttccgtgttagccactcattcatgacagtgaatacctgttcactgtcacccacttatttatcacaggagtaacttaattactgttacccacgcattcaccacagtagaaacctgtacactgtcacccactcattcgccccagtgtgaaccggttcaatatcagccactcattcatcacagtgagaacctgttccctgtcagcttctcattcatcacagttggaacctgttcactgtcacccactcattcaccaaagtgggaaactgtttactgtcactcacttattcatcacaatgggaaccttttcactgtcacccacacattcattacatgaggaacctgttcaccatcacccactcattcattacagtgggaacctgttcactgtcagccactcattcacaagagtgggaacctgttcactgtcaccaactcatttaccacagcagaaatctgttcactgccaccaacttactcatcacagtgggaatctgtacactgtccgccactcattcatcacagtgggtacccgttcactgtcacccactcattcattacagaaggaacctgctcattgtcacccactcgttcaccacagtagaaacttgttcactgtcacccacacattcaccatattgggaaagtgttcactgtcagccactcaatcatcacactggaaacctgttcactgtcagacactgattcaccatagtagcaaccagttcactgttacccactcattcaccacgatggaacctcttcactgtaagccacttatttatcacagtgcaaagctgatcactgtcagccactcatttacctcagtagaaaccagtttactgtcacccactcaccacacttggaaactgttcactgtcactgagtcactcatcagagtgggaacgtgtttactgttacacactcattcatcacaatgggaacctgttcaatgtcagccactcattcaccacagtgggaatttgttcactctcattcacacattcaccagagtgataaccttttaactgttagccactcattcaccacagtgggacctgttcttttcacccactcattcatcactgtgagaaccagttcactctcatcaactcactcatcacattgggattctgttcagtgtcagccactcattcatcacagtgtgaaactgctcactgtgagtcatgcattcaccacagtggcaccctgttcactgtcaccaactctttcaccacagtaaaaacctgttcactgtcacacactcactcatcactgtggatacctgttcactgtcagacactcattcatcacagggggagcctgttcattttcaccagcgtattgatcacagtggaaacctgttcagacactcattcaccatagcggaaaacagttcagtttcactcacttgtttaccgcagtagaaacccgtacattgtcagccactcagtcaccactgtgggaacttgtttattgtcagccactcagtcatcacgtgaaaaattgtttactgtcacccactcattcatcacagtgggaacctgttccacgttaccccaccattcaccacactgggaaactcttctctgtcgtcctcccattcatcagagtgggaacgtgttctatgtcatgcactcattcattacaccagaaacccgttcactgttacccactcattcttcacagtggaaacctgttcactgtcacccactcatttaccacagtgggaacctgttcactgtcagtcactaattcatcacactaaaaacttattcactgtcagccactcattcatcactgtgggaacgagttcactgtcacccactcattcatcacagtgagaacctgttcactgtccccacctcatgcatcacagtggtaacctgttcactgtcacccactcactcaccacagtgggtacgtgttcactgtcacccactcattcaccacagcgggaacctgtaaactgtaacacactcagtcatcacagtaggaacttgttcacttttagccactcattcacctcagtgggaacctgttcactgtcacccacacatttatcacagtagaaacgttttcactgtcaaccactcactcatcagagttaagaatctgttcactgtcagccactcactcatcacagtgggtacctgttcactgtcaaccactcactcatctcatcgggaacctgttcactgtcacccagtcattcatcacagagggaacatgttaaatgtcagccactcattcaccacagtgggaacttgttcactgtcactctttcaccacagtgggaacatgtcccctgtcagccactcattctccacagtaggaaccggttcagtctctccaactcacttatcatggttggaaacttttcactgtcaccctctcattgaccacattgggaacctgttcactctcacctactcactcattacaatgagtacctgttcaatgttagccactcattcaccacagtgtgaacctgttcagtgtcacccactcactcatcacaatgagaacctgttcactgtcacacactcaccacattgggaaccatatcactctcacccactcattcaccacagtgggagcctgttctctgtcacacacttatttatcagtgtttgaacctgttctctgtcacccactcactcatcagagtgagaacttgtttgctgtcacccacttaataaccacactgtgaacctattcatggtctcacactcactcatcacagtggaaaactgttcactgttaccacacattcaccagagtggggaacttttcactgtcaggcacgcaatcaccacaatgggaacttgttcgctctcacccactcactcaccaccctgggaatatatttattgtcacccacttattcatcaacgtggaaacctgttcactctcacccactcatttatgacagtgagaaccagttcactgtcatccacctattcatcatagtggaaacctgttcactgtcacccactcgtttattacagaaggaacctattcactatcacacactcatcacagtgggaacctgttcactgccaagcactcattcattacagaaggtacctgttgactgtgattcacacattcatcactgcgggaacttgttcactgtcagtcactcattcaaaccagttcactttcacccaccagaccaccgcagtagaaacgtgttcagagtcaccaactcactcatcagagtggaaacccgttcagtgttagccactcattcatcacagtcaacacctgttcactgtcacccacttattcattacaggaataacttaatcaccgccacccccttactaattacagtagaaacctgtacactgtcatacacttatttaccccagtgggatcatgttcactatcagtcagtcactcatcacatgtgaacctgttccctgtaagccactcattcaccacagttggaatgagttcgctgtcaccatctccttcaacttagtaggaatctgttcaccatcagccactcagtcaccacagtgggaaccaggttactgtcagccactcactcatcacagtgagaacctgctcactgtcaccctctcattcctcacagtgggaacctgttcactgtcacctactcattcaccacagtgggaacttgttcactatcacccactcattcaccacagtgggatcctgttcactgtcactcattcattcatcacagtgggaacctgttcactgtcacccacgcattcattacatgaggaacctgttcattgccacccactcatttatcacagtgggaacctcttaactataaaacacacattcaccacagtgggagcctcttcactgtcacccactcattcttcatattgagaacctgttcactatcacccattcattaattacaggagaaacctgttcactgtcacccacttattcatcactgtgagaacctgtttactgtcacccagtcactcaccaaagtgggaaagtgttcactatcacccacccattcatcatggtggaaacttgttcactgtcgcccactcattcaccacagtggttacatgttcactgtcacccactcattcatcaaagtgggaacctctttacagtcagccactcattcacaacagtgggaacctgttgcctgtcagccactcattcattacagtgggaacctattcactgtcaccgagttattcattacaaaaaaaccctgatcactgtcacccactcgttcaccacagtagaaacctattcactgtcaaccactgtcactccagtggaaacctgttcactgtctgccacttgttcaccacattgagaaccagttcactgtcaataactcactcaccactgtgggaatctctttgtcacccactcattcaacacagttggaacctgttcactgtcaccctctcatccattacaggggaaaactgtttactgtaactccctcattcatcacagtgagaacatgttcactgtcacccagtcactcaccacagtggcaacctattcactgacacccactcactcatcatcatgggaacctgttcactctcacccactcattcactacggttggaacatgctcattctcaccacctcatgcatcacagtgggaacctgttcactgtcaggcactcttttaccacagtgggtacctgttcactgttacccactcactcttcacagtgggaacctgttcactgtcaccaacttattcattacagtaagaaccttatcactgtcaacgacatattcaccactgtaggaacctgttcactctcatcaattcattcaccacaatgtgaacgttttccctgtcagccaaccattccccagagtgggaagctgttcactgtcacccactcattcatcacagtgtgtacccattaactataagccattcatgcatcctgatgggaacttcttcactgtcacccacacactcattacaacctgatcaatgtcaaccattcactcaccaaagtgggtactagttcattctcaaccactaattcatcacagtgtgaacctgttcattgtcacccaatcattcattacaggaggaacctgttcactgtcacccacaaagtcattagattgggaacctgttcactgtcacacactcatccatcacagtggaaacctgttcactgtcaagcactcattcactactgtgggaacctcttcattgtcaacgactcactcaaaactgttggaacctgttcaccgtcacccattctctcattacagtgggaacctgctcactgtcgtcctctcattcatcacagtaagaacctgttcactgtaaaccacatactcacaactgtgggaacctcttcactctaaatcactcattcaccacagtgagaacaagttctacatcagccacttattcaccatattgggaacctggtcactgtcaccactaattcatcacagtcagaacccgttcactataagccactcattcatcacagtgggaacctgttcactgtcatccactcactcatcactttgggaacatattcactgtcagtcaaacattctccacagcaggaaaccgttcactgtcatgcactgtttcattacagttagaacctgttcattctcacccacttactcatcaggatgggaactttcactgtccacctttcactcaccacagtgggaacatgttcactctcacttacacattcaccatagtgggaacctgttcagtgtcaggcactcattaatcacagtgggatcctcttcactgtcagctattcactcaacacattgggaacctattcactgtcacccattcatcacagtggaaacctgttcactgtcagccagtcattcaccacagggacaacatgtccactttcagccacacattcaccacagtgcgaacctgttcactatcacccactctttcattaccgtgcaaacctgttcgttgtcacccaatcattcattgtgggaagaacctgttcactgtcacccacaaggtcattagagtgggaacatgttcactgtcacacactcattcatcatagtggaaacccgttcactgtcaagcactcattcactactgtgggaacctgttcactgtcacccactcactcaaaactgtcagaacctgttcactgtcacccactgtctcattacagtgggaacctgctcactgtcaccctctccttcatcatagtaagaacctgttcactgtaaaccacacactcacaactgtgggaacctattcactctaaaccactcattctccacagtgagaaccagttctatgtcagccactcattcaccacagaggaaacctgctcactgtcacccactcattcatcacagtcagaacccgttcactataagccactcattcatcacagtcggaacctcttcactgtcacccactcactcattacagtgggaacctgttccctgttgaccactcattcaccacagtgggaacctgttcattcacacccactcaatcatcacagtgggaacctcttggctgtcaagcactcactaaccacagtgagaatctgttcatactcacccactcacttaccactgttaaaatctgttcactgccacccattccttctctcagtgagaacctgttcactgtcacccactcactcattagagtgggaacctgttcactgtcacccacttatacatcaaaattgtaacctgttcgctgtcacccactcactgatcaaatcaagaatgtgtcaaaagtcacccagtcactcatcacagtttgaatcttttcgctgtcactcactgactcatcacaatgcaaacggattcactgccaccactcattcatcacagtgggaagctgcacattgtcactcaataatttatcacagttggaacctgttcactgtcaccccactcattcatcacactgcagcctatttattgtcacccactcactcctcataatgggaacctgttcactgtcacccactcacacaccatagtgggaacctgctcactgtcagccactcattctccacagtgggaacgtgtccactcccacccactcattcacgacagtggggaatctattgattgtctcccacccattcatcacagtggtaatctgttcgctgtcacacacacattcatcaaagtgggaacctgttcactgtcatccattcacttatgacagtgagaaacttcactgttagccactcattcaccacagtgggaacattttgtctctcacccaaacattcaccacagtggcaacccgtttactatcacccactaaatctttatggtgggaacctgttcactgtcacacactcattcattacaggaggaacgtgtttactgtcacctactcattaatcacagtgattaatcacattaaacctgtttaatgtcagccactcacttcccacagtggaaacccgttcactttcagccactcactcccaatagtggaaatttgttcactgtcacccactcattcacctctgtagaaacctgttcactgtctcccaattattcgccaaagtgggaaccagttcacggtcacccactcataaatcacactgggaaactgttcactgtcgcccactcattcatcactgtggtaacctattcattgtgagccactcgtttatcacagtgggagccattttactctcacccactcatcgagagcagtgggaagtagttcattgtcattcactcgttcactgcacgagaaacctgtgcactgtaagccactcagtcaccacaaagagaacctgtttaatttctgccactcatccaccacagtgagaatcactgtcattcactcattcaccacagtgagaacctgttcactgtcacccacacattcatcacagtgggaacctgttcactgtcacccactcactcatcgcagtgagaacctattcattatcagacacacattcaacacagtgggaatcttttcactctcactcactcattcaccaaagtgggaccctgttcactatctcccacttattcattaatggaggaacctctttactgtcagcaagttattcattacagtgggaacctgttcactgtcactcactcgttaaccgcagtaaaaacctattcactgtcagccatacgttgaccaaaatgggaacctgtttagcgtcacccacttattcatcacagttgggacctattcactgtcgcccacacattcaccacagaatgaacctgttcactttcaaacactcattccccacagtggtaatcagttctctctcacctactcattcaccacagtgggaaccatttcaccttcaccctctcgctcaccacagtataaacctgttcactgtcagccactcagccactacgattggaacctgtttactctcaggcactcattcaccacagtgggaaccattcactgtcacccactcattcatcacagtgggaacctcttcactgtcacacagtcatttattacagagggaacctgttcaccttcatggactcattcattacagaaggaaagtgttcactgtctcccactcattcattacagtggaaacctgatcactgtcacccactcactcacctctgtgctaacctgtcactgtcagtctgtcactcatcacagtggaaatctgttcactctcacccactcattcaccacattgggaacctgttcaccttaaccagtcactcatcacactgggaagctcttcactgtcacacattcattcttcacattgggaaccagttcactttcacccactcattcaccacagtgtgaacgtcttcactgtaacccactcattcatcagagtgggaaccatttcacagtcactcacacattcattacaaaaggaaactgtttgatctcacgcactcactcatcaaagtgggaacctgttcactgtcacccacttactcactagagtgtgaacctgttcactgtcagccactcattcatcacagtggcagcctactcactgtcagccactcactcaccacagtgggaaccagttcactgtaacccactcgttaaccgcagtaaaaccctgtttactgtcagccactcaggcaccatactgggaacctgtttgctgtgagccactcatccaccacagtgggaagcagttcactgtcacccactctttcatctctgttagaacatgttcactgtcaaccactcatacctcacagtgaaaacctgttcactgtcacccacgcactcaccacagtaaaaacctgttcactgtcaccatctcattcaccacaatgaaaacctgttcaatgtcagccacacattcactacagtgggtacctgttcactgtcagcccctcactcatcacaatgggaaccagctaactgtcacaaactcattcatcacagtgggaaactgttcactatcagccactcattcaccacaaggggaacctgttcggtttcagccactcattcaccactgtgggatcctgttcactgttacccattcattcatcacagtgcaaactttttcactgtttcccactcattaattacaagaggaagcttttcactgtcacccactcattcatcaccatggaaacccgttcactgtcacccacttattcatcacagtgagaacctgttcactcgcccacttgttcaccacattgggaagctgttctcagtcagccacccactcaccacagtgggaacctgttcactgtcacctactcactcatcacagtgggaaaatattcattgttgcccactcactcatcagcttgggaacctgctcactgtcagccacccaataaccacagtgggaacctcttcactctcacccactcattcagcacagtgggaaacttctgactgtcacccactctttcatctctgttagaacatgttcactttcacccactcattcctcacagtgaaaacctgttcactgtcacccactcactcaccacagtaaaaaccttttcactgtcaccatctcattcaccacaatgaaaacctgttcaatgtcagccacacattcatcacagtgggtacctgttcactgtcagcccctcactcatcacaatgggaaccagttaatggtcacaaactcattcatcacagtgggaaactgttcactatcagccactcgttcaccacaaggggaacctgtttactttcagccactcattcaccacggtgggacgctgttctctgttacccactcattcatcacagtgcaaacttgttcacagtctcccactcattaattacaagaggaaacttttcactgtcacccactcattcatcaccatggaaacctgttcactgtcacccacttattcatcacagtgagaacctgttcactcgcccacttgttcaccacattgggaagctgttctcagtcagccacccactcaccacagtgggaacctgttcactgtcacctactcactcatcacagtgggaaaatattcattgtcacccactcactcaccagcgtgggaacctgttcactgtcagccacccaataaccacagtgggaacctattcactctcacccactcactaaccacagtgggaatgggtttaatgtcagccactcattcaccacagtgggaacctattcactctcacccacacattcaacacattgggaacctgttgactgtcacccacccattcatctcagtgggatcctgttaatggttacctacacatttatcacagtgggaacctattcactctcacccacacactcatcacagtgagatacttttcatggtcaatcactctttcaccacagtgggaacctgttcactctcacccactcatacatgacaatggtaacttgttaactgtcacccactaacttatcacagttggaaagttttaactgtcacccattcactcatcacagtgggtacctgttcactgtcacccactcactcatcacagtgggaacctctttactgtgagctactcattcctcacagtgggaacctgttcactgtcacccactcattcaccactgtgggaaacacttcactgtcacacactcattcatcagagtgggaaccctgttcacagtcactcacacattcataacaaaaggcaactgttccctctcatgcaatcactcatcacagtggaagcctgttctttgtcacccacttattcaccagagtgggaacctgttcactgtcagccactcattcatcacagtggaaacctattcactgtcagccactcattcaccacagtgggaacctgttaactctcccccactcactcatcacagtgggaacctgtttatggtcaccaacacatacatcacagtaagacccttttcagtgtcaaccacacattcaccactgtggaatcctgttcactctcacccactcattcattacaacgagacccttttccctggcagccactcatttcccacagttggaacctgttcactgtcacccattcattcatcacagtggaaacccgttaactataagcaactcattcatcacagtgggaacctcttcactttcacccacacactcagtacaatgggaaccagatcaatgtcacccactcactcaccacagtgggaacttcttcattctcaaccactcattcatcacagtgagaacctgttcactgtcacccactcattcatcacagtggaaacgtgttcactgtcatccacacactaattacaatggaaacctgttctctgttacccactcatgcatcacagtgatacattttctctgtcaccaactcactcataacattgggaacatgttcactctcagtcactcattctcctcagtgggaagcagttcactgtcacgcactgatttatcacagtgagaacctgttcactgtcagccactcattcaccacagtgtgaacctgttcactgtcacttactcatccaccacagtgggaacctgttcattgcccactggttcattacagaagaaacctgtttactctaacccactcattcaccacactgagaacctgttccatgtcagccacttatttactacagtggcaacctgttcactgtcaacattcatcagagtagaaatccgttcactataagccactcatttatcacaatgggaacctcttcactgtcacccactcactcattataatgggaacctgttcactattaaccacttgttcactgtcacccatacattctcaaagtggggacctgttcactgtcagccactcactcattagagtgggaaccctttcactgtcttccactcattcataacaattgtaacctcttaactgtccagcactcactcatcacatcaggaacctgttgaaagtcacccactcactcatcacaatgggaatctgttcaatatcacccacttactcatcacagtgggaatgtgttcactgtcagcaactcattcatcccagtgagaagctgctcactgtcacccactcttttatcatagtggggacctgttcactgtcacccactcattcatcacactgggaatctatatattgtcacccattctctcatcataatgggaaccttttcactgtcatacactcacacaccatagtgggaacctgttcactgtcagtcattccttcaccacagtaggagccttttccccctcaccctctctttcaccacagtgggaatctgttgattgtcacctaatcattcatcacagtgggaacctgttcactgtcacccacattttcatcacagtgggaacctgttaactttcaccaactcattcatcacagtgggaacccattcactgtcagccatacattcaccacagtgggaacattttcactctcaccaaaacattttccacagtgtaaacatgttcactgtcacccactgaaccatcatggtgagaacctgttcactgtcacacactcattcattacaggaggaacgtctttactgtcaccaactcattcatcatggtgggaacctgttcaatgtcagccactcattcaccacagtgggaacctgttgactgtcaggcactcatttcccacattgggaacctgttcactgtcatccactcgttcaccatagtagaaacctgttcactatcaccaacttactcaccaaagtgggaacatgttcactgtcacccactaatttatcaaagtgggaaactgttcactgtcgaccacacattcaccacagtggtaacctgttcactgtcagacattcattcatcagaatgggaaccatttcactgtcacccactcattcaccacagtgggaagtaatttactgtcaaccactcgttcaccgcagtagaaacctgttcactgtaagccactcagtcaccacagtgggaacctgtttacagtcagccactcattcaccacagtgggaaccagtttactgtcattcactccttcactacagtggaaatctgtttactgtcacccacacatttatcatagtgggaatctgttcactgtcactcactcatcacagtgagaacctgttcatggtcagccattcattcaccacattaggaatcttttcactctcacccactcattcaccacaatgggaaactgctcactgtctcccacttattcattactggacgaacctctttactctcagtaacttattcatcacagtaggaacctgttcactgtcagccacccattaaccacagtgagaagctgttcactgtcagccactgacacatcacagtggcaacctgttcactgtcacccacacagtcaccacagtgaaaacctgttcattgccaccaactcaattgccaccgtggaacctgttcactctcacccactcatacatcacagcggtaacttgttagctgtcacccactcactcatcacagtagatacctattcactgtcactcacttactcatcacagtgggaacctgttcactgtcagctgctcattcttcacattgggaacctgttcacagtaaacccctcattcatcaccatgggaacctgttcactgtcacccactcatgcatcacactgggatcctattaattttcacccactcactcatcacactgggaacctgttcactgtcactcactcaatccccagagtgggaacctgttgactgtcagccactcactcaccacagtgaaaacctgtttattctcacccactcattcaccacagtggaaacaatttaactgttacccactcctgcatcacaatgggaacctgtcactgtcactcactcattcatcacagtgggaacctgtcactctcaaaaactcagtaatcacagtgggaacctgttcactgacagccactcattcaccattcaccacgatgggaagctgttcactctcacccattctttcaccactgtggaaagcttttcttttttatttttttattattattattattatactttaagttttagggtacatgtgcacaatgtgcaggttagttaaatatgtatacatgtgccatgctggtgtgccgcacccattaactcgtcatttagcattaggcatatctcctaatgctatccctccccccactcccaccccacaacagtccccagagtgtgaagttccccttcctgtgtccatgtgttctcatagttcaattcccacctatgagtgagaacatgcagtgtttggttttttgtccttgcgatagtgtgctgagaatgatgatttccaatttcatccatgtccctacaaaggacatgaactcatcattttttatggctgcatagtattccatggtgtatatgtgccacattttcttaatccagtctatcattgttggacatttggcttggttccaagtctttgctattgtgaatagtgctgcaataaacatatgtgtgcatgtgtctttatagcagcatgatttatagtcctttaggtatatacccagtaatgggatggctgggtcaaatggtatttctagttctagatccctgaggaattgccacactgacttccacaatggttgaactagtttacagtcccaccaacagtgtaaaagtgttcctatttctccacatcctctccagcacctgttgtttcatgactttttaatgattgccattctaactggtgtgagatggtatctcattgtggttttgatttgcatttctctgatggccagtgatggtgagcattttttcatgtgttttttggctgcataaatgtcttcttttgagaagtgtctgctcatgtccttcacccactatttgatggggttgttagttttttcttgtaaatttgtttgagttcattgtagattctggatattagccctttgtcagatgagtaggttgcgaaaattttctcccattttgtaggttgcctgttcactctgatggtagtttcttttgctgtgcagaagctctttagtttaattagatcccatttgtcaattttggcttctgttgccattacttttggtgtttgagacatgaggtcctcgcccatgcctatgacctgagtggtaatgcctaggttttcttctagggtttttatggttttaggtctaaagtttaagtctttaatccatcttgaattgatttttgtataaggtgtaaggaagggatccagtttcagctttctacatatggctagccagttttcccagcaccatttattaaatagggaatcctttccccattgcttgtttttgtcaggtttgtcaaagatcagatagttgtagatatggggcattatttctgagggctctgttctgttccattgatctatatctctgttttggtaccagtaccatgctgttttggttactgtagccttgtagtatagtttgaagtcaggtagcatgatgcctccagctttgttcttttgacttaggattgacttggtgatgcgggctcttttttggttccatatgaactttaaagtagttttttccaattctgtgaagaaagtcattggtagcttgatggggatggcattgaatctataaattaccttgggcagtatggccattttcacaatattgattcttcctacccatgagcatggaatgttcttccatttctttgtatcctcttttatttcattgagcagtggtttgtagtactccttgaagaggtccttcacatcccttgtaagttggattcctaggtattttattctctttgaagtaattgtgaatgggggttcgctcatgatttggctctctgtttgtctgttattggtgtataagtgtgcttgtgatttttgtacattgattttgcatgctgagactttgctgaagttgtttatcagcttaaggagattttgggctgagacaatggggttttctagatatacaatcatgtcgtctgcaaacagggacaatttgacttcctcttttcctaattgaatacactttatttccttctcctgcctaattaccctggccagaacttccaacactatgttgaataggagtggtgagagagggcatccctgtcttgtgccagttttcaaagggaatgcttccagtttttgcccattcagtatgatattggctgtggctttgtcatagataggtcttattattttgagatacgtcccatcaatacctaatttattgagagtttttagcatgaagtgttgttgaattttgtcaaaagccttttctgcatctattgagataatcatgtggtttttgtctttggttctgtttatatgctggattacatttattgatttgtgtatattgaaccagccttgcatcccagggatgaagcccacttgatcatggtggataagctttttgatgtgctgctggattcggtttgccagtattttattgaggatttttgcatcaatgttcatcaaggatattggtctaaaattctctcttttggttgtgtctctgcccggctttggtatcaggatgatgctggcctcataaaatgagttagggaggattccctctttttctattgattggaatagtttcggaaggaatggtaacagttcctccttgtatctctggtagaattcggctgtgaatccatctggtcctggactctttttggatggtaagctattggttattgccacaatttcagagcctgttattggtctattcagagactcaacttcttcctggtttagtcttgggaggttgtatgtgtcgaggaatttatccatttcttctagattttctagtttatttgcgtagaggtgtttgtagtattctctgatggtagtttgtatttctgtgggatcggtggtgatatcccctttatcattttttattgaaaatgatcatttttattgaaaatgataaaggagatattaacctgttaactttcagccactctgttatcacagtgggaacctctccactgtcacctaataattcatcacagtgggaacctcttcactgtgagccacttattccctgttgtgggaacctgttcactctcaatctctaattcaccacagtgagaatctgctcactgtcagccactcagtcatcacagtgggaaccagttcactgtcacctactcgttcaccgcagtagaaacttgtttactgtcactgatacacgcatcacagtggaaacctgtttactgtcagccactcattcaccacagtgggaaccagttcgctgccacccattccttcatgaaaacgagaacctgttcactgtcacccactcattcctcacagttggatcctgtcaccatcattcactcactcaccacagtgggaacctgttcactgtcacccactcattcaccagagtcttaatctgttaactttcatccactctgttatcacagtgggaacctgtcccctgtcacctaatcactcatcagagtgggaacctcttcactgtgagccacttactccctgttgtgggaacctgttcactctcaatctctaattcaccacagtgagaatctgttccctgtcagccactcgttcatcacactggaaccagttcactgtcacctactcattcaccgcaatagaaacttgtttcctgtcaccaaaacacgcatcacagtggaaacctgttccctgtccaccactcatccatcagagtgggtacttgttcactgtcacccactcgttcattacaggggaaacttggtctttgtcacccactcttttaccacagtagaatccttttcactgccacccactcattcaacacagtgggaacctgttcactgtcagccgctcattcatcacattggtaacctgttcactgtcagcgactccatcaccacattgagaacctctttactgtcatccactcaccatcatagtgggaacctattcactttcacacactcattcagcagagtgggaacctgttcagtttcacatactcattcaccacagtgggaaactattcactgtcacccactcattcatcatagtgggaaccttttcactgtcacccactcattcatcatagtgggaacttttcactgtcacccactcattcattacaggaggatcctgtacactgtcatccactcattcatcacagtggaaaccggttcactgtcattcattcactaatcacattgcgaacctgtttacagtcacccactcgctcatcacagagggaacttgttttctttctcacactcattcaccacagtgggaaccttttcactgtcacccactaactcaacacggtggaacctgttaactttctcccactaattaaccacagtgggaatctctacactgtcacccactcactcatcacagtgggaacctgttcactgtcacccctcactcatcacaatgggaacttcttcactttcatccacccactcatcacagtaagagcctgtgcactgtcacctactcattcatcacagtgggaacctgttcagtgtcacccactcactcatcactgtgggaacgttttcactgtcactcactctttcatcacactgagaacctgtccattgtcagctactcactcaacacagtgtggacctgttgactgtcatcaattcactcaccacgatgaaaatcagctcactgtcagccacgcattcaccacagtacaaacctcttcactctctcccactcattcaccacaatgggaacctgctgactttcacacactcattcatcacagtgggaacctggtcactgtcatgtgctcatttatcacagtggcatgctgttcactgtcacatacttactcatcacagtgagaatctattaactattagccacacaatcaccgcaatgggaacctgttcactttcacctactcattcgccacagtgggaacatgtttactgtcactcactcattcatctcagtgggcagtggttcactgtcacccactcattcattacaggggtaacttgttcactgtcacccactcattcaccacagtgggaacctattcactaccagcctctcattcaccacaatgcaaacctgttaacaatcagccactcactcaccacagtggcaacattttcactgtcacccactcgtttgctgtagtagaaagctgttcactgtcagccacacatacaacacagagggaaccttttcactgtcagtcatgcattcatcacagtaacaacctgcacactgttgccctctcattcaccacattgagaacctgttcattttttagccactcattcattgcagcgggaacctgttcactcaccaactttttctccgcagttggaaggaattcaccatcacccactcattcacacactcttccaccccagtagaaagctgttcactgtcagccactcagtcatcacaatgggaacctgtttactatcagccacttgttcaccacagtgggaaccagttcactgttcacacactcattcatcacagcgagaacctgttcaatgtcaccccactcattcatcacagtaagaacctgttcactgtcaccaactcactcaccatgataggaaccagtttactgtcacccattcatttaccagagtggaaacctgttccttgccagccactcagtcatcacactgggaaactgttctcacccactcacttgtcacagtgggaaactcttcactgtgagccactcaatcactactgtgaaaaacctgttcactctgagtcactcgttcaacacagtgagaagctattcactgtcagccacatattcaacaagtaagaacctgtccactgtcagccattcattcacaacagtgggaaagtgttcactatcacccattcagtcatcacagtgggaacattttcactgtcaaaaactcattcatttcactgggaacctgttcactgggaacctgttcactgtcacccactcattcaccatagtggttacctgttcactgtctccaactcactcatcccagtgggaacctgttccctctcacccactcatttgccacagtgggaacctgttcactgtcacccactcatttatcacagagggaacatcttcactgtcacccattcattacaaaaggaacctgttcactgtcacccactcattcatcatagtgagaacttgttcactgtcagttgctcattcaccacagtgggaaccagttaactgtcaagcactcattcaccacagtagatacatgttcactgtcacccactcacacatcacagtggtatcctgttcactgtcagccactcactcatcacagagggtgccagatcactgtcacccactcattcattacaggaggaacctaatcactgtcacccactcgttcaccacagtagaaacctgttcactgtcaaccattcattcaccagagtgggaacctgttcactgtcagccactcattcaccacagtggaaacagttcactgtcacccatttgttcactgcagtagaaacctgcacactgtcagccacacagtcaccacagtggttacctgtttactgtcagccattcacttatcacagtgggaacatgttcactgtcacccaatcatttatcaaactgggaacatgttcactgccaccctctcattcaccacagtgggaacctcttcactgtcgcccactcactcattgcagtgggtacctgtttactgtcacaaacccattcattacaggaggaacctgttcactgtcaaccacatattcatcacagtcagatattgttcactgtcaaccactcactctccacagtgagaacctgttcactctcaaccactcattcaccacagtgggaaactgtccactgtcacacactcattcatcacagtgggaacatgttcactgtcatccactcattcattacaggaggtaccttatcactgtcactcactctttcacaacagtagaaacatgttcactgtcctccaatcactcaccacagtgtgaaccggttcactgtcagccattcgttcactactgtgggtacctcttcactctcacccacccatttagcacagtgagaaccttttcactgtcagccactcattcaccacagtgggaacctgttcactgtcacccattcactcatcacattgaaaatctgttcattgttacccactcactgaccacagggggaccggttcactctcacccactcatcacagtgggaacccgtttactgtcacacacgcattaatcacagtgggaacccgtttattctcacccactcacttatcacagtgtgttcttgttcactgtcagccactcattcaccactgtgggaagctgttccctctcaccaactcactcatcacagtgggtacctgttcactgtcacccactcactcagcacagtgggaacatgttctctctcatgaccgcattaacaatggtgggaacttgttcactgtcacccacacactcatcacattgggaacctgttcactgtcacccactcactattcacagtgggaacctgttcggtgcctttcactcattcatcagaatgggaacctcttcactttcacccactcactcatcacagtaagaacctgttcactgtcacccactcattcatcagggtaagaacttgttcactgtcactcactcattcatcacagtgaaaaccagttcacccttacccactcattccctacagttggaacctgttcactctcacccactaaatcatcaaagtggaaaccttttcactgtcacccacacattcatcacagtgcaaatattttcattctcacccactcattactatgggcaccgcttcactgtcagccacacattcactacagtgggaacctgtgcactctcgccaactcacccaccacagtgggaacctaattactgtcatcaactaactcaacacagtgggaaactgttcactgtcacccactcatgcataacaatggaaacctgttcactgtcagccacttcttcatcacagtgggaacatgttcatttaccacagtgggaagtggttcagtgtcacccattagttcactgcagtagaaacctgttcgttgtgaccaactcacttaccacagtgagaagctgtttactgtcggacactcaattcaccacagtgggaaccagttcactgtcacactctcattcatcacagtgagaatatgttcagtgtcacccactcaataacgacagtgggaagcagttcactgtcaccaactcattcaccacagtgggaacctgttcactctcagtccctcactcatcacagtgtgaacctgttcactgtcaccaactcactcatcacatttggaacttgttcactgtgagccacttattcactatggtgggaacttgttaactttcacccacatattcagcacattgagaacctgttctctgtcagaaactcatccgcagcagtgggaaactgttcactgtcacccaatccatcatcacactaagaatatgttcactgtaagccactcattcacttctgtgggaacctgttcactctcacccactcactcaccacagtaggaacttgttcaccctcacccactcactcatcactgtgggaacctcttcactctcacccacacattcgccacagtgggaacttgttcactgtcacccacttttcaatacaggaggaacctgttcactgtcaccaactcattcatcacagtgggaacctgttcactgtcagccactcattgagcacagtgggaacctgttcattgtcacccagtctttcacaatacaaacgtgttcactgtcacacactcactcatcacagagggtacctgttcatagtcagccactcattcgtcacagtcggtaactgttcactgtcacactctcattcattacaggaggaacctgattactgtcagtcattctacacagtaggaaacggttcactgtcagccactcattcatcacagtgttaacttcttcactgtcagccactcattcaccacagtaggaagaagttcactgtcacccactctttcagctcaatagaaatttgttcactgtcagccactcagtcaccaaagtgtcaagttgtttactgtcagcctctcactcatcactgtgtgaaactcttcactgtcaacaacacattcatcacagtgggaacctgttaactgtcacccactcattcaccacagtgggaatctgttcactctcaccaactcattcatcacagtgggtacctattcactgtcaccaattcacttaccacagtgggatcctgttctctctcacccactaattcaccacagtgggaaccagttcactgtcacccactcattcctcacagtgggaacctgttcactgtcactcactcattaataatatagtaaatagttcactgtcaccaactcattcaaggcagtgggaacctgttcactgtcacccactcactaatcactgtggaaacctgttaactgtcacccactcactcatcacagtgggaaactattcactgtttcccactcattcatcacaatggaaacctgttcactgtcacccactcactcatcacaatgggaaccggttcactgtcacccactcactcatcaaagtaagaacctgtggctgggcacagtggctcacgcctgtaatcccagcactttgggaggcttaggcgggcagatcacgaggtcaagagatcaaaaccatcctggccaatatggtgaaaccctgtctctaccaaaaatacaaaaattagccgggcatggtggtggatgcctgtaatcccagctactcgggaggctgaggcaggagaatcacttgaacccaggcagcagaggttgcggtgagccgagatcatgccattgcactccagcctgggcaacaagagcgaaactccgtctcaaaaaaaaaaaaaaaaagtaagaacctgttcactgtcatccactcactcatcagagagggaacctgtttgcccttacccactaattcaccaccgtgggagcctattcactcccacccactcagtcgtcatggtggaacttgttcactgtcacccacacattcatcatagtgggaacttgttcactctcaccaacccactcatcacaatggctactccttcactgtcagccactcatttatcacagtgggaacctgtgaactctcacctactccctcatcacagtggaacctgatcactgtcacagactaactcacaacaggtggaacctgttctctctcacccacttatttaccacattgggaacctgttcactgtcagccagtcattcatcacagtgggaacatgttcactgtcacccactcactcatcacagtgggaacctattcactgtcacccactcatttatcacagggggaaccagttcactgcaactcactgactcattacagtgggaaactgttcactgtcacccactcacttatcacagtggaaacctgctcaccatcagccactctttcataacattgggtacctgttcactgtcacccactcattcaccacagtgggaagcatttcaatgccacccactcgttcaccgcagtagtaatctgttcactgtcagccactcagtcatcagaacctgtttaccgtcagacactcattctcaacagtgggtacaagttgactgtcaccctctcattcatcacagtgagaacctatttcctgtcacccactcaccacagtgggaacctgttcactgtcacccattcattcaccacagtgggaacctgttcactgtcaaccactcactcttcagagtgggaaccggttcactgtcattaactcactcatcacattgagaatctgtctactgtgagccactaattcactatggtgagaccctgttcactctcaccaacccattcagcactgtgagaacctgttcactgtcagcaactcattcacaacagtgggaacccgttcaatgtcacccaatccatcatcacagtaagaacatgttcattatgagacactcattcactactgtgggtacaagttcactgtcaccttctcatcacagtgagaacctattcactgtcacccactcattcaccacagtgggaacctgttcactgtgagccactcactcttcacagtggcaatgggttcactgtcattaactcactcatcacattgggaacctgctactgtgagccacctgttcactatggtgcgaacctgttcactctcaccagcccattcatcacagtgaaaacctgttcactgtcaacaattcattcacaacagtgggaacttattccttgtcacccaatccgtcatcacagtaagaacatgtttattgtgaaacactcattcactactgtgggaacctgttcactctcactcacttgttcactgcagtagaaacctattcatgctcacccactcactcatcactttgggaaccagttcactcacccactctttcaccccagtgggaacctgttcactttcacccactcattcatcacagtgagtacttattcactgtcacccacccttatcacacgaggaacatgttcactgtcacccacacattcagaacattgggaatctgttcactgccagccactcattcaccacagtgggaacatgttcactgtcaaccttttatttaccacagtagaaacctgttcactgtcatcaacccattcatcacaatgggaacctgttcactgtcacccactcattcaccacagtgagaacctcttctctgtcatccacacattcatcacactgggaacctgttcactgtcacccactcattcattacgaaaggagcctcttcagtttcacccactcattcttcacaatgggaacctgttcaccttcactgccttattcaccatagtgggaacctcttctctgtcatccacacattcattacagtggaaacctgtttattgtcacccacccattcattacaaaagaaacttcttcactttcacacactcatttttcccaatggcaacctgctcactgtcactcactcattcaccacagtgggaacctgttcactgtcagccactcattcatcacggtggtaacatattcactgtcagtgagtcattcaccaaattgggaacctgttcactgtcacccactcgttcactgcattagaaacctgttcactgtcagccactcatttaccaacgtgtgaaactgttcactgtcacccgctcactcaccacagtgggaatcagtttactgtcacccactcattcaccacagtgggaacctgttcattgtcagcctctcactcatctcagtaggaacctgttcactgtcacacactcactcatcacagtgcgaacctgtttactgtcagccactcatgcactacagtgggaacctgttcactgtcacccactcagtcatcacagtgggaacctgttcactgtctttaactcattcattacagtgggaagctgttcactgtcacttactcattcaccacagtaagattctgttcactgtaactcagtcatcacagttggaacctgttcactgtcacaaactcattcattcctttgggaacctgttcactgctacccactcattcaccagagtgggaacctgttcactgtcaccgatacattcattacatgaggaacctgtttactgtcacccactcattcatcatagagggaaactgttcactgtcaatcactcactcaccacagtgggaacctgttcactatcacccactcattaatcacagtggaaacctgttcactgtcagccactcattcgttacagtggttacctattcattgttaaccactggtttaccgcagtagaaatctgttcactgccacacactcattcatcacagtgggaacctgttcacagtcagccattctttcttcacactcagtacctgatccttgtcacccatgcattcaatacaggaggaacctgatttctatcacacattcattcaacacagtagaaacctgttcactttccacattcattcactgcagtagaaaacggttcactgtcagccactcattcatcacagtgagaatgtcttctctgccatccacacattcatcatagtgggaacctgttcactgtaaggcactcatgtactaaaaaaaggaacctcttcacttttacccactcattcttcacaatgggaacctgttcaccttcacccgcttattcaccacagtgggaacctctttgttgtcagcctctcactcatcacagtgggaacctgttcactgtcacccactcactcatcacagtgtgaacctgtttactatcagccactcattcaccacagtgggaacatgttcactgtcacccactcattcactaaagtgaaaagttttcactatctctcactcattcaccacagtgggatccttttcactgtaacccactcagtcatcacagttgtaacctgttcactgtcacagactcattcattcctttgggaacctgttcactgtcacccactcagttatgacagtggggacctgttcactgtcacccacacattcattaaaggaggaacctgttcactgtcccccactcattcattacagttggaacctgttctttaccacccacacattcattacatggggtacctgttcactgtcacccactcatttctcacagtaagaaactgttcactgtcagccactcattcaccaccgctagaacaagttcacggtcacccacactttcaccacagtgggaagctgttcaatgtcacacagccgttcacagcagtagaaacctgttcactgtcagccactcagtcaccacaatgggaacctgtttactgtcagacactcactcatcacagtgggaacctgttcactgtctactcactcattcatcacattgggaacatgttcactctcaccaactcactcatcacagtgagaactttatcactgtcaccaactaactcaccacaggggaagcctgttctctctcacctactcattcaccacagcgggaacctgttcactgtcagccactcatttatcacagtgggaacatgttcactgttgtcaactcactcatcatattgggaacctgttcactgtgagccactcattcactacggtcacaacctgttcactctcacccacccattcagcacagtgagaacctgttcactgtcagcaactgactcacaatagtgggaacctctccactgtcacccaatccgtcatcacactaagaacatgttcactgtcagccattcattcactaacgtgggaacctgttcactctcacccacccattcaccacggtaggaacctgttcacactcagccactcactcatcactgcaggaacctgttcactctcacccaatcattcaccacaatgggaacctgttcattgccacctactaactcattacagtggtatcctgttcacagtcagccactcattcgtcacagtcagtacttgttaactgttacccactcattcattgaaggaggaccctgattactgccacccattcatccaacacagtagaaacctagtcactgtccccacacattcaccacggtgttaacctgttcactgccagcaactcactcactacagtgagaacctgttcactgtcaccgactcactcatcacagtgggaacctgttcaatgtcacccaatcactcatcacagtgggaacttgttcactgtcgcccactcactcatccctatgagaatctgttcactgtcacccactcattcaccacagtgggaatctgttcactctcaccaactcactcatcacagtgggtacctattcactttcagcaaactcactcatcacagtggaaacctgttctctctcaccaactcattcaccacagtggcaacctgttcactgtcacccattcattcatcatagtgggaacccgttcactgtcacgctctcactcatcactgtgggaacatgtttactgtcacccactcattcatcaatatgataaactcttcactgtcaccaactcactcatgacagtaagaaccagttcactgtcacccactctctaatcacagtagaaatctgttcactgtcacccactcactcatcacagtgggaaactgttcactgttttccactcgttcatcacaatggaaacctgttcactgtcacccactcactcatcacaacggaaaccggttcattgtcacccacttactcatcacagtaagaacctgttcactgtcacccactcattcatcacagtgagaacctgttcactgtcacccacacattcagcacagtgggaatatgatcactctcacccactcactcatcacagtgggtaccccttcactgtcagccactcattaatctcagtgggaacctgtgaactctcaccgactcactcatcacagagggaacctgatcgctttcacaaactaacttaccacaggggaacctgtcctttctcacccactcattcaccacattgggtacctgttcatggtcagccactcattcatcacaatgggaacatgttcactgtcacccactcactcatcacagtggaaaccagttcactgtcacccactgattcatcacagtgggaacctgttcactgtcacccatttttcatcacactgggaacctatacattgtctcccaaactctcactacagtgggaaacttatcactgtcatccactcactcatcacaatgggaacttgttcactgtcagccactccttcatcacggtgggaacctgttcactgtcacccacttattcatcacagttggaagctgtacgttgtcagccactcattcaccactgtgggaacctgttcaacctcaaccattcattcaccacagtggaaacctgttcactgtcagccactcattcatcacagcaggaacctcttcactttcacacactcattcatcacagttggaacctgtacactgtcacccactcattcactacagtgggagcctcttcactgtcaatcactcattcatcacagtgggaacctgttcactttcacacactctaatcacagcgaaactatcacccacttatccatcactttgggaacttgttcactgtcacccacttactcatcacagtggtaactggttgactgtcatgcactcacttattacagtgggaacctgttcactgtcgcccactcactcatccctatgggaacctgttcactgtgaatcactcattcatcactgtgggaacctgttcactctcacccactcagtcacctcagtgaaaacctgtacactctcagccactcattcaccacagtgggaacatcttcactgtcacccactcattcattacaatgggaacctgttcaacgtcacacactcattcattgccagagaaacattttcactgtcacccactcatttatcacagatgaaacctgttcactttcactcactcactcaccacaatgagaacctgttcactttcacccactcactcatcacagtgggaacctgctcattgttacccagtcatttatcacaatggaaacctgttcactctcacccactcactcatcacagtgggaacctgttcactgtcaccaacttattcatcacagtgggaacttgttcactctcaccaactcactcatcaaagtggttaccctttcaatgttagccacttattcaccacagtgggaatctgttcaccctcaccaactcactcatcactgtgggaacgtgttcactgtcacccactcactcaccacagtgggaagctgttctctcccacccactcattcaccacagtgagaacatggtcactgtcacccacgcattcatcacagttggaacctgttcactgtcacccactcagtcaccaccatgggaacccgttcactgtcacttagtcatttaccacattggaaaactgttcagtgtcacccacacattcatcacagtgggaacaagttgactgtcacccactcattcattagagtgaaaacttgttcactgtcacccactcactcaccacagtgggaacctgttcactttcatccactcatcacagtgaaaacctgttctctttcacccactcattcaccacattggataactgttcactgtcacccactcattcattacaggaggaaactgtttactgttacccactaattcaccagagtgggaagctgttcactctcacccattctctcttcacagtgggaacctgttcactgtcacccacatattcatcacagtgggaacctgttcactctcactaactcgctcatcacagtgggtacccattcactgtcagccacttattcaccatagtgggaatctgttcaccctcaccaccacactctttacagtgggaacatgttcactgtcacccactcactaaccaaactggaaacttgttctttcacacctactcattcacgacagtgagaacctgttctctgtcacccattcattcatcacagtgggaacctgttcactgtcactcagtcaccacagtaagaacttgttcactgtcacccactcatcataacaggagtaacctgtacactgtcacacattcattcattagagtgagaatgtgctcaatgtcacctgcttaatcaccacagtgggaacctgttctctgtcacccactcacccattacaatgaaatactgttcactctcacccactcattcgccacagtggaaaactgtgcactgtcacccacgcattcttcacagtggaagactgttgactgtcacccactcattcattacaggaggaaacgtttcactgtcacccacacactcatcataatgggaccctgttcactgccagccactctttcaccacagtgggaacctgttcactgtcacacaatcgttcaacacagtaaacacttattcactgtcactcactcatttatcatacaaggaacgtgttcactgtcacccaatcattcatcaaagtgggaaactgttcactgtcaggcactcattcaccacaatgggaacctgttcactgtcagccactcactcaccacagttggaacctgttcactttcactgactcactcatcagagagagaacctgttcactgtcaaccactcattcgccactgtgagaacctgttcactctcacccactcattcattacaatgagaacctgttcactgccacccacttattcaccacagtgggagcccgttcactgtcacatacacattcgtcacggtgtaaacctattcaccataaccaactcattcatcacagtggaaacctgttcactgtcaaccactcactcattactgtgggtacctgttctttgtcattcactttttcaccatagtgggaaccagttcaccctcacccactcattaaacacagtgggaacctgttcgctgtcaccactcattgatcacaatgggaacctgttgattgtcaacctctcattcattacaaggggaacctgttcaccgtcaccactcattcatcaaactgtgaaactgttcactgtcagacacccattcattacagtgggaaactgttcactgtcacccacttgttcactgcagtagaaatctgttcattgtctgcaacttactaagcacagttggaacttgttcactctcactttcttatacatcacagtgggaacttgttcactgtcaccaactcatcaatcacagtgggaacctgttctttttcagccactcattcatcacagtgggaacctattcactgtcacccctcactcaccaaagttgaaacctgttcactgtcacccactcactcatcaaagtgggagcctgttcactgtaaaccactcattcatcaaagtgggaacttgttcattgtcagccacttattcaccacagtgggaacctgttcactctcaaccactcattcaccatagtgagaacctgttcactgtcagcctctcactcatcacagtgggaacctcttcactgtcacccactaattcatcacagtgggaacctcttcactgtcacacactcacgaatcgcagtggaaacctgttcactgttacccgctcacccatcacagtgggaacttgttcactgtcacccattcccttatcaaaatgggaaccaatttactgtcacccactcagtcaacacagtgggaacctgttcactgttacccactccctcatcacagtcagaacctgttgactgtcacccacacttccattacattgggaacatgttcatggtcaacatgcactcatcacggtgggaaactgttcactttcacccactcattcattacaaggggaacctgattattgtcacccactttttcatcacagtgggaacccgttccctttcacccactcattcattacaggaggaacctgtttactgtcacacactcattcatcaaaatgggaacctgttcactttcaaccactcactcattataggcagaacctgtttactgtcacccactcgttcattgcagtgtgaacctgttcactgtcagcaactcattcattacagtgggaacctgtttactgtcacccactcattcaccactatgagaacctgttcactgtaacccactcatttaccgaagtaaaaacctgttcactttcacccacacattcatcactgtgagaacctgttcactgtcaaccacatatgaaccacagtgagaacctgttcactgccacccgctccatcaccacaatgagaactttttttaccgtcattcactcactaatcagagtggcagcctgttaattgtcacccactttttcatcacagtgggaacctgttcactgtcacccattcattcatcacagtggaaatctcttccctgtcacccattcattcatcacagtgggaacctgttcactgttacccattcattctcaacaatgggaactagttcactgtcacccactcattcatcacagtgggaacgtgttcactgtcagccactcattcatcacagtgggaacttttcactctcacccattcattcatcacagtgggaacctgttcactgtcacccactcattcattacaggactaacattttcagtgtcgctgactcattcatcacagtgggaacctcttcactgtcagccacttatttaccacagtgggatgctcttcactttcacccactcattcaccatactagaaaccagttcacagtcacctactaacagtggaattctgtttactgtcagttactcatttatcacagtgggtacttattcactgtccccaactcattcattacaggaggaacctgatcactgtcacccactcattcaccacagtagattcctgttcactgtcacccacttattcatcacagtgggaacctttccctgtcagccactcgttcaacaccgagggaaatatttcattgtctctgactcattcaccacagtagaaacctgttcagtcagccactctgttaccacataggaacctatttactgtcagccactcactcatcacagtgggaacctgttcactgtcacccatccattcatcacagtgggaacctgttcattgcctcccactcattgatcacaggaggaacctgttcactgtcacccactcattcatcacagtgggaaactgttgactgtctcccactcattcaccaaggtgggaatctgttcactgtcagacactcattcattgcactggaaacctgttcactgtcagccactcactcaccaaagtggaacctattcactgtcacccacttatttatcacagtgggaaagtgatcactgtcagccacattcaccacagtgggatattgttgactgtcagcccctcactcaccacagtaggaaacttttcactttcccccattcactcaccacagtgggaacctgttcactgtcacccactcactcatcacagtgggaacctgttcactgtaacctactcattcatcacagtggaaccctgttcactgtcacccactcattcatcacaggagaaacctgttcactgtcaccctctcattcatcacagtgggaagttgttcctctcagccactcattcaccacagtgggaaccaattcactgtcacccacttgttcactgcagcataaaattgctcactgtcagccactcagtcaccagaatgggaacctgttaactgtcactcactcattcatcacactggaaacctattcactgtcacccactcagtcatcacagtgggaacctcttcactgtcacccactcattcaacacagtggcaaccttttcaccgtcagcccctcattcatcacattggtaacctgttcactgtcagccactcattaatcacagtggtaacttgttcactgtcacccactcattcatcacagtgtgaaactgttcactgtctcccactctttcatcacagtgggaacctgttcactgtcacccactcactcaccacagtgggaacttgttcactgtcacccactccctcatcgcagtgggaacctgttcactgtcatcctctcatttatctcagtgagaaactgatcacagtcagccactcattcaccacagtgggaacctgttgactgtcaacctcttactctccacaatgggaacctgttcactgtctcccactcatttatcacagtgggaacctgttcactctcagccacttatacaccactttggaaacctgttcactgtcgcccactcatttaccacagcgggaacctgttcactgtcacccactcactcatcacggtgctaaactgttgactctcacccgctcatttacccagtgggaacctgttcactgtcaccccctcattcatcacagtgggactctgttcactgtcacccactcattaatcatagtgggaacctgtttactctcagccactcattcaccacagtaagaacgtgttcattgtcccccactcgttcaccacagtagaaaccttttccctttcacccaatcactaatcacagtggcaacctcttcactgtcacctactcatccattaccagaggaatatgatcactgtcaccccctcgttcaaaacagtagaatcttgttgacagtcacacactcattcaccacagtaggaacgtgttcactgtcagcactcattcatcacaatggaaaccttttccctgtcagccactcattcaccacagtgggaaccagttcactgtcacccactcaatcactgcagtagaaacctgtgcactgtcagtcactcagtcaccagagtgggaattttttcactgtcgcttaccctttcaccacagtgggaacctgttctctgtcagccactaatttatcacagtgggaacctgttcactgtcaccaacacattcatcactgtgagaacgtgttcactgtcacccacttattcattacagtagaaccctgttcagtctcacccactcactcatcacagtgcaaacctgtttactgtcagccactcattcattacaggagaaacctgatgactgtcatccacaggttcaccatcttagaatttttttcactgtcacccactcattcaccacagtgggaactttttcactttggccgctcatgcatcacagtgggaaccagttcactgtcacccactcgttcaccgctatagaaacctgttcactgtcagccaccctgtcaccacagtgggaacctgtttactgtcagcccctcactcatcacagtgggaaactgttcattttcacccactcatacaccacagtcagaacctgttcactcgcacccactcactcatcacagagggaaccttttcacaatcagccactcattcatcacagtgggaacctattcactgtcaggcattcattcaccacagtaggaacctgttcaattttagccactcattcaccacagtgggaacctgttcactgtcacccacacaatcatcatattgggaacctgttcattgcctcccactcatttattacaggattaacctgttcactgtcacacactcattcatcacagtggaatctgttcactgtctcccactcattaatcacagggggaacatgttcactgtctgacaccccttcaccacagtgggaacctgttcactgtcagccactcactcacctcagtggaacctgttcactctcacccactcattcaccacagtgggaacctgttcattctcacccactcattcaccacagtgggaacctgttcactgtcagtcactcactcatcacagtgggaacctgttcactctcacccactcactcaacacagtgggaacctgttcactctcacccactcattcaccacagtgggaacctgttcactgtcactcacacagacatcacagtgggaacctgttcactgtcacccactcattcattacagaaggaacctattcactgtaacccactccttcatcacagtgtgaacctgttcagccattgctcctggccagaaaagcttttaatcatctactgactgggaacaggaaaaccttttataatctagaacaaagagaatgagtctgcttgccacttacactgcatcaagattttgggatcttaaaccttgggttcataatctttaaactcacaaagggccctctaaactcttgcaatcatactggagatcttaattggagacttttaggtaaatctaagcagagaagcttctcctcaaaagcagatggcaaccttgacattgatagctttctccagaagatcaaaaacaaagacatctcttctatcatgacactcctagttcacttttttaatggctctacaaacaacagaaataaaaaagggatctcttgtgtgcacttttggggtatacttatatatgtaaataatttcacaactaaccttatatatcaacaaacttatgtctggataggtaaaagatgaagggccactataggtgagaaataagaaatgtctcgcattcttgctaaatgtgacatgggaaatttgttgtctcataatataagaaacagaatatttatccactgctcttggagcaatattgacttaaagagaaacttatgcagaataagttagagcacattgccaggaggccattactcttctgagtggtcattattcgttaggtctttctttcaaaggcttagagtaaatgaggctatggttggaaatttatcttccataataggctcaatagcagattctactgtaaaggctatggttacccaatagactttaaaattttttactaaagttgtgctaaataaaagaatttatctagtttacttactggataaacagagaagtatctgtgcagttgctagtatttgtagttgcacatggagaaatacatcgagtattacagagattcagttgtaggggattaatgaacacactgcttggttgaaatgaggagaccacttatctagctaatcatttgatctatttaatcatagttggttggttcaatggggacctcggttaaaaagcatacttcaggctgagcatggtggctcatgcctgtaatcctagcactttgggaggccaaggcaggtggatcacttgaggtcaggagtttgaaaccaatctggccaacatgttgaaaccccgtctctactaaaaatacaaaaattagccagctgtggtgacacaagtctataatcccagctacttgggaggctgaggcaggagaatcccttgaatcccagaggcagaggttgcagtgagccaagatcacatcattgcactccagcctgggtgacaagagcaagacttcgtctcaaaataaataaataaataaataaataaataaataaataaataaataaataaatccatacttcaaactcttgatattattttcctgatagtcaaaataatagtcaccctactgcactctattctctcaaaaattataaatctttgcatgcagtcatctctagaatgccaagtgatctctctttaactggaatgatgaaaacttgaagatgtatttgaccatgagaacaccataacctatgaatgatctgataagaacggaaacctaaaataatgaaaactgagagtgacattaaaactctgaggtttggttacactccgatctatgtgaaaacttaatcaaaaggggggaatctttttaaacaaaattattggaggccatcatcctggactgagcttgttcactgggcccaaacagaccaaaatgaaccaattagtcattcatgctaaatgtgacatagttaaactgaaaatttaaagaaataggtagattctaaaactgaccaggtcttgtttttcttttgcaaacagcagatatcaatacaaggaggtcccatccactgtaatccttttaaacaataataacctgaagtcccttttttcactttacaaaacccacagttctactattttacagtggaaattgagactaaatacatcttttttcttttcttttctttcctttttttgagacggagtctcactctgtcacccaggctggagtgcagtggcatgatctcggctcactgcaacctctgcctctcaggttcaagcaattctcctgcctcagcctcccgagtagctgggactatgggtgcccgccaccacgatgggctaattttcatatttttagtagagatggggtttcaccatattggccaggctggtcttgaactcctgacattgtgatccgcctgccttggactcccaaagtgctggggttacaggcatgagccaccatgcccgtccataagtaaatttttgatggtgacaaagtaatatcgatgtctaaagtttggggttatttctcaaaattgagaagctaaccaaatgagaaatattgttaaattaattatagcctaaagttaaccccttttatgtttaatttcggtcaataggtttttctgtacatagttaactaaaacctaactggatatctaaatagattgttacctattcatgtaccaaccactatgtttgtgccaataaaagaacatcaactgttcaagccatattcaaataaggcaaatcccaaactgtaattaatctggttatttctgtaccacttctattttctgtatgtcactttgcttttcctgtgcataaatcttttttaccatgtggctgtgctggattctctctgaggctactcaggtcccacagactacttaatttgcaaattattatttgcttaattaaactatgttaaatttaatttctctgaagttatttttcttttaaaagttttcaaatgttttctttcatatatatatacaagtatatatacatgtatatatatgtgtatatatatatatttttttgtgtgtgtgtgtgtgtgacagtgtctcactctgttgcccaggctggagtgcagtggcgcgatctcggctcactgcaatgtccgcctcccgagttcaagtgattctcatgcctcagcctcctgagtagctgggattacaggagcgagccaccatgcttggctaattttgtattttcagtagagacggggttttaccatgttggtcaggctggtctcgaactcccaacatcacgtgatctgcccgcctcagcctcccaaagtgctggaattacaggtgtgagccaccacgcccggcctcaaatttgttctatgataaaaaataagtgatgtgttgtagggctttgattatctaaaataagttatgttttccaaattactctatatcagctatgtcagctattttttccaaattattctatgttctttcaaaatgcttttgcaatttcttttttgttttttcattttgtttgaaatagagtctcactctatcaaccaggctggagtgtagtcgtgtaatcaatcatggcttaatccagcttccaccttccggtcttaaacaatcctcctgccctagacacctgagtatcatcatgcctggttaattttttaaatttcttttattgagccaggatcttattatgttgcccaggctgcacttgaactcctgagcttaaatgattctcccatctcagcctcccaagcctcccaaagtattggaattaaggatttaaggccaccatgtgcttcagtaatttctcgagattatttccaataataaatagtactttatgggcacaaatctacaagcaatctggtttttattttagaagtgtcactctccagggttttaagagtctagggcagctacttgagtagtgtgatccatggaggtacataggctttgaagtcagacagagttgatcctgagtcccggcccagccacttagaagctgtgagtgtttggacaatttcttgatgtggaagagttctacagactacatatgcagaaaaagcagaatggactgggcatggtggctcacgcctgtaaccccagcactttgggaagctgaattgggtgaatcacgacgtcaggagatcaagaccatcccggccaacatggagaaaccccatctctactaaaaatacaaaaattagctgggtgtgttggtgtgggcctgtaataccagctacatgggaggctgaggcacaagaatcacttgaacacaggaggcagaggttgcagtgagccaatatcacaccactgcactccagcctggtgacagaatgagactccatctcaaaaaaaaaaaaaaaaaaaaaaaagcagaaggatactgattgcaaatatggtagcaatttttcatccctcctgtatccatgtacattgacaggtgcttttacagccattcccatgaagagtcagaatctattttccaaacgcttgatctggctggccttatttgctcatggcagtagaaacctgagaacatgacaatgtgttggtttggagcctaggctcaaacagttttgactgcttctgcttttcttttctttccttttcttttctctgtttttttctttttttgagaaggagtctttctctgtcatccaggctggagtgcagtggcatgatcttggctcactgcaacctccacctcccagattcaggcaattctcctgactcagccttctgagtagctaggactacaggtatatgctaccacacccagctaatttttgtatttttagtagaggtgaggtctcgccatgttggccagactcgtttcaaacttctgacctaatgtgatccacctgtcttggcctactaaagttctggaattacaggcatgagccagcatgtccggcctgcttctgtttttctttcagaatgctgccatattcatgaaaaaaagcccatattaggccaggcacggtggctggtgcctgtaatcgcagcactttgggaggccaagatggacagatcaagaggtcaggagatcgagaacatcctggctaacacagtgaaaccccgtctctactcaaaatacaaaaaaattaaccgggtgtggtggtgggcacctgtagtcccagctactcagggggctgaggcatgagaatcacttgaacctaggaggtggagcttgcagtgagcagagatcgcaccactgcactccagcctgggcgacagaacgagactccgtctcaaaaaaagaaaagaaaaaagcccatattagccaactggagtataagatactatgaagaggagaagtaaggtatccctgttgacagtcccagaagcagaagctcacctctacaagcacagctgctgctttcctagtcaatgagcagctcatgatacatgtctgaaggagctcagctgagaacagaagaatggccccactgagcccagcctaaatggctgagcatttcaattatgagcaaatcagttttggatggttcattatgctgccatagttaactaatatgtgcacccagtgcagatagaatgccaagatttaataacaggttgattactagttaccttctaacattgggcaccataaaagtactgatatttttcccgatttaaagttagatgtcttgtaagataatgttgagaaatgcagaaatatggccaggggtggtggcttatgcctataatcccagcactttaggaggccaaggcggttggatcacctaaggtcaggagttcaagaccagcctgaccaacatggagaaatcccgtctctactaaaagtacaaaaaattagccgggcgtggtagtgcatgcctgtaatcccagctactcgggaggctgaggtaggagaattgcttgaacccaggaggcagaggttgcagtgagccaagaccacaccattgcgctttagcctgggcaacaagagtgaaactccatctcaaaaaaaagaaatgccgaaatacatgtggacatgtatgcatgtgattgtgcttatattcactcagtttcccacaccacagaagaaaacaggtaaccacagcctgaacattagagtcgaggtcaaatagcaaaataagtttgcctttaatctattttcttcctatgtaaacattaaaggtcaagactgtgaacagatctgaagacatagttttttttctcctgtggcccatcatcctttgctcactgtctgatctctgaaagaaagatgggcaacaggtggtaagcagtggtttacctgtgatttattcctgctgccatcagctttttctatagccactatttgtttcaccctcggaactgaaaagagacgttgataaatagaggctgtcccctcacctgtggcagaaaaggggtgttcaggccctccacccccactgacatcacagctgtacttcaatgtggcagctattggccatgtgtggctcctgggtgcctggaatgtggctggtctgaactgcgatgtgctagaaaggtaaaatacagaattagtttcaaagattttgtttcaaatgtatttatatttcattaataattacatattgctcacatattaaaatgaaaatattttgaatatattgggttaaataaattgctacaatcaattccacttgtttcttctttctttttaaagtttggctactagaaaatttaaaattcacctgtgactcacattttatttcagaggattgcctgttcaaaggaccagaatacaggaaggtcataaaatctaaaattttagaacaattgttgttatactttgttcatttgtgaatagccatataatatattatttttgaatgcatataaattgatacacaaggtaagggcaaatactctctggtgtgagcctggctcagctcaggaaggaagccctgtctgaaaaggctgcagcctaggctgtcactcgctcttctttcagcccagcatctgatcacatcttctgtcactcagggcctgaaaagaaggtgccttaaatatcatccaatcagagacgctgggctgggaaccgtccaatcaggaacgcagctggtgcggatagggcggcttccgggatgtggcggggcctttgtctctcgctgcagcctgagctctaggtcttgttttccctgctttgtgttttctgctcgtggacgcccagcctctgtggccctgtggcctgcaggtattgggagatccacagctaagacgccgggaccccctggaagcctagaaatggtgagagtgccaggtccgccatcccgagggggaaaggggttggttgaaaccggtgggaagcggctgtggcgggactcaggcctccctgtagtcagctccacaatctgcgctccagttctttttgcccagctcggccccagttcctccagccataagatggcggctgcgctgacagccggcccgggcgtcctgtctcttccctgcgcagtgactgtgccctggactggagccctctctgggcagctctgcattcgcagcaccgcgtctctcccagattgagcagggaccacgggagggttgtcaggggagaatcctgactcggggtgcgggttcatgaaagagctttgggctgtggggttcccagttcctctttttttctgttaaaaatgtatggggggacgggcgtggtggctcacgcctgtaatttcagcactttgggaagccgaggcgggcggatcatctgaggtcaggagttcaagaccatcctggccaacatggtgaaaccccgtctcaatttttaaaaatacaaaaattagccgggcgtcgtggcgcgcgcctgcaatcccagctactcaggagtttgaggcaggagaatcgcttgaacccgggaggcggaggttgcagtgagcctacatcgcgccactgcactccagcctgggcaataagagtgaaactccgtctcaaaaaaaaaaaaaaaagatgtataggagtcaccgcaaaaatattaaagaacttaaaaagtggttcaagtattgtagagcactcagctatggtttgtagtttgtggtccatgggaggagcttgaataaaagacttttataaggtgcatgataaaaaaatcaaattagtaattggttaggtacagttatatagtctcttaatttgtacgatcgtgttggcaattttctggttatgtgatcagaatttaattggcagtttatagttggttaagcctgaattttgttttccccgatgtggtaatttactaaaaaatgaaattttagttagatttttttaaaaaggaggaccccagggactagagccacctcagtctaattgcctgccactgaatcattttcacagtccacaggggacttcttttcccctgcatttttcacatatgtctcaagcagggtctcaagtctacttcttactccctgttcttccagattaactctgatttacagtaaaatactaaatttccagtgtcattgacattcccaaatgccaccttcccctctctgatacacattatcaattatttgtcctttattgtacattttatatttcaattaataattcttccacaaaacattggatggcactatttaaaaaattgtcttctgtttgtaaatatttcccatgagaagaaagtgaataataatccctgacaccatattgtaaaaaaatctctgtgtctcttttccttttatcttccctaggcacagagttcttatcagaatattggtgggtcaaggtttccgtttggagactttatggtgtgatgggtcatcagccactcttcagttttttcctggtcctgggttttcagtactgtatggggataaaccaggatgcccaccattgtggctatgttggctagagtgtctagtgaatatcagctcctgggtcattttctctcataggacaacctgaggtatgaagtgtatcctatcaagggagcaggtagatacccagggtctgagtgcagtctcctggtgtactcttcctttgaaaagctaactccttgagacattaaaattgacttcacccagctgggcgcggtggctcacacctgtaatcccagcactttgtgaggccgaggcgggcggatcgcgaggtcaggaatttgagaccagcatggccaatatggtgaaaccccatctctactaaaaatacaaaaattagccaggcctggtggcacacacctgtaatcccagctactagggaggctgaggcagaagaattacttgaacccgggaggtggaggttgcagtgagccaaggtcatgccactgcactctagcctgggtgaaagagcgagactgtatacaaaaaaaaaaaaaaaagattgacttcacccaacccagcttctatttcttggagacacattgagagaaaaatgcagaaataatttttaccccctggattctctaagatttgtgaaagaaaaaatagtatcccaaaagacaaaaaaaaggtcaccccagtgagatggtgcaagaacttgcaaagtaaaatgcacttggggcagtcactggggcatagtgtagtgtctcttgagaggttggtcattgagaactttagtgagcaggagcgggtgggagaatctttcaagtgattgaacggcctgacttgacacataggtcagacacatctcttttctaatcagcactgtccctctgtgggtttgtcaccttgaaaagatttgttcacttattttgacttcagcttcttttaattgtaaattgcatttgattagtaaagtttaaaaggcacaaaaatatttgcacagggtgtaaaagaagtgggttttagaaaaaaattaaaatctaatcatatattccatttgttaagaattctcatttacttgttcctttgtcagagtgagtttaaaaattttctcaggtgtgcttatggctgggtgattttaaacagaattccaaggcttagcttttagaatgttatcagggaaaaaattaggaaaaatctctcttccattttggctgtagaaaataaatagatttccacaagaaaatgtggtatataattggtgagttacatagattcatgaaaacacaaatttctctttttgcagggtaaagttgtgacagtgaatatttctgtcccatatcctgttatcttgatttttaagtttcatgataaattttatgagatgaaacttggtacctcctagaagtgttcccatgactaattgtttactacatgattttttatagaaataataaaataatacatttattgtctgaaaggaataaatgcttttgcttttctaattgaggtataaaatgtaagcaccaaaaattttctttttttatatgaacactgtgtttgagtgatttcattggagttttcagtttcaaaaaccaagggaataaatctgacatggaaattaaagcttgaacccagtgactccaacctaaggctaatattgagcctacaaaaaaaaaagattattaaaggcccagttagttctttctggggagcctcccctgcagatgtcccagcctgctcaccccagccatggaagaagtctttccatcctgagagaagctccaaagccttggaaagctggggccccacaggcagatgcagttaaggttaagatgaaaggaaactgggagggtctcactgatgataaagttttttattgttttgaggcactgtctagactttgtaaaataaaacaaagttagatttgtgtaaaaaaaaaaattgaattccaaaggaatattgcaacaggaggaagtaccaactatatcatctttatggcttgcaaagtttaggcagacaaaggctttgtttcctagggaggagcataaaagattagaaaaaaggtgggaggggagtggcaaatggagtgtgaaaaaaatcagattttagatcagataatgttttaccctgaagtcagcatgttcataggagggacataaaatggggttgtatgttgactcacactcagggtagctcaaagttcaggagcctgtgggaaaaaaataaacttaagtttgattaagaagtattttatttctgtgcgtggtggctcacacctgtaatcccagcactttgggaggctgagatgggcatttcacctgaggtcaggagtttgagaccagcctgaccaacacagagaaaccccatctctactaaaaatacaaaattagccaggcgtggtggtgcatgcctgtaatcccagctactcaggaggcggaggcaggagaatcccttgaatccaggaggtggaggttgttgtgagctgttatcacgccattgcactctagcctgggcaacaagatcaaaagtgtctcaaaaaaaaaaaagtattttatttagaccagtgaagacaaattcagctcatttttttaatgagaaaaggaagaaaatgtgtacagtatgtatctggctatgtgataggtaagaaaagggagtgtcttctaagtcataataagaagggtgtttttggctgggcatggtggctcacacctgtaatcccaacactgggaggctgaggcgtgaggatcacgaggtcaggagttcaagaccagcctggccaagatggtgaaaccctgtctctactaaaaatacaaaaattagctgggcgtggtggtgtgtgcctgtagtcccagctacttgggaggctgaggcagaagaatcgcttgaaccggcaggcggaggttgcagtgagccgagatcatgccactacactccaccctggcgacagagcaagactccatctgagggggaaaaaaagtgtttcttttcataaactgttgctggagcacacaaaggatgacttttattaatcacagctattttccaggattatgtatgtgtttcatttttccccacctctttttttgtcctatacatttctttcatttgacttcttctgggttgtatcttttataataaactacagagtttgctgggttctgtgagtagctctatcaaattattgaactagagggaggttatgggaatccccaaattttaaacagtagctcagaagcataggtgggcctatggggtttgtgactggcatctgtaatgagggcagtgttgtgggactgaaccctgaatcggggtctgtgctgactctgggtggtgtcagaattcaaatttcagataatgagtaggtgctggagaattgctttgtgttcagcaaactctatagatttgataccagaaaaaagatatcacagaggcctggcctcgaatggaactctgggtgtctgggaaggggaggctctgctctcctgtacacaggctgtcacactgcccattgtcttgtgattccaggtctcctcccagggtgactgtggactgaaaacttagaggaaaggacctctgatgacagacccccttttcttgcagctgccaccacaggagtcccacccactcacacacactagacattgacgtgtccacatccctctcaagactagtcatcatcctcaggaatttcaccacagcattgtggatcctagtatttcttgccaaaatcccacaagagtgtctacaagtctcctggcatatcccaacccccagacactgaatctgcagcagcaaactgttttctccaccaacctagggttctggaccacctgttcataatctcatctgcctgcacaggcacaaataaatcagagtacagccccaccgggaccgctgtctgtagcaaaaacctacagtccttccacctacattgcactttaccccacccatgaagtttttttcttttaacttttgattttggttcaggggtacacgtgcaggtttcttatataggtaaaattgtgtcacgggggtttggtgtagattattttctcacagaggtactaagcatagcaccaaaccaatatttattcaaattctccttgtcatctcaccctccacccttactaggcctcagtgtctgttgtttctttctttgtgtacgtgttcttatttagctcttactttttttttttttgagatagagtcttgctctgtcacccaggctggagtacagtgacaggattcactagacaaaaactgatctcttcttttttttttttttgtttgagacaccgtcttgctctgtcacccaggctggagtgcaatggcatgatctcagcttactgcaacctccgcctcccaggttcaagcaattcttctgcctcagcctcccaagtagctgagactacaggtgcacaccaccacacctggctaatttttgtatttttagtagagacagggcttcaccatcttggccaggttggtctcaaactcctgaccttgtgatcccacctcagcctccaaaagtgctgggattacaggcatgagccactgcacccagcctatttctatttctttaaccttgctaagaatacatatgtatcttataataaaattaccctagaaaaccttaaaatatttctttaaatttcttagtatatgttataaaattgagggggcagtggcttggcttaaaaagattaagattacacaaactctgggatttaagtttctcttaggtaagcttaggaaaaacagaactggaaataccctagtggcatagagaacagagttctacatagggtcctctccctgccccagttctgtttagatttaacctatttggaggccttatttaggtctggccccaccctggagtcttgcctcacacaatttgttagaagaaatcaaagttttgggccaggcgtggtggcttacgcctataatcccagcactttgggaggccaaagcaggcagatcataaggtcaggagttcgagaccagcctgaccaacatggtgaaaccccatccctacttaaaaaatacaaaaattaccctggtatgttggcatgcacccgtaatcccagttacttgggaggctgaggcaggagaatctcttgagcccaggaggcagaggttacagtgagctgagatcatgccattgcactccagcctgggtgacagagcaagactccgtcccaaaaaaaaaaaaaaaaaaaaaagaaatcagagtttttgtctggtgaatccttctgcctttctagagttcatgctcacaatttccttaaaccccaaaacagataaatggtaaaaataaagtatgtattttagggtcttaatttttaaattttgtattaaagtgagtgcttgcagaaacattctatttaacaacttgttttctatttttgcaaatccagtagttgctctgcaagtcacataaaattaaatacaaacacagtaaaaaacttctctaaaatacattaaactttcctttctgtattcctctcatctgtctatatttagcttttcttctatgcaattaaaaaaaatcaatgacagagaaacaagaagaaatggaaaggcagggctctttatttaaatcctaagaattattaaacacttaataacatctttcagggtgttatgatgatgaaatcacgtaatgtgttatggccaacacagtgctttttaacatccttttgagtacatagttcctgcttaatatatcttgcattagtacaggtgtacatgttgttgccaaatgcaggcttattcaaacattgctgccttctgtttcctctgtaaactttaatgagccagcaaagaatatgatacttaaggatggagatggattttatttatttatttagagacagagtttcgctcttgctgcccagactggagtgcaatggcacgatcttggcccaccacaacctctgcctcccaggttcaaatgattctcctgcctcagcctccctagtagctgggattacagacatgcaccaccacacccagctaatttttttgtatttttagtagagactgcgtttctccatgttggtcaggctggtctcaaactcccgacctctggtgatccacctgcctcggcctcccaaagtgctgaaattacatgcatgagccactgcgcctggcagagatgggttgtctttatttgtaccagaagtatttggttgtgacaagagtgctgagtgtaagggaacctgtgctgtgcctgctttctctaatgccaataatgagcccaagggaagcaacatcagcactgacagggttgttacctattcatggactcttttcaaacctgcagaatcatattacatagaatggagccaaaattaccaagtgatttataagctcattaaaacttgagaggcaatgcttagctaagtggttatcagcccaggcttctcattaggattccatggccaatttgcagaaatctctttacttgtgccctttccacagattctgtttattgttctagggggaagcagtcatgttgtagtaatgaagtgcctcatgtgactcttaagttgaggccagaatcaagtatgaggtgttccagatacattcatgagttaagttccacctttgcactaaagggtggccgcaggactgtttctgtttggatttggtagggacagagcaatgtggccatattttctttttctttttctttttctttttttttttttttttttgaggtgcagtttcactggagtgcagtggtgcaatctcggcttactgcaacctctgcctgctgggttcaagcgattctcttgcttcagcctcccgagtagttgggactacaggcacatgccaccacgcctggctaattttttctatttttagtagagatgctgtttcatcgtgttagccaggatggtctcaatcttctgacctcaggatctgcctgcctcggcctcccaaagtactgggattataggcgtgagccaccaagcccggccatggcccatattttcattattgtagcagaaattgctggtgtctgtgacaggggagggcacctgagaacaggaaaagtgaaacatattttgatacccatggagcagctcattgttcctgaatctcttccattataaaggacataaatgagtgagctttttctgcaggtcttgatccttctgcctgtgggtctggtggtagcagatgagcagttgatgttgacatctttaaagacatattctcaacatgcagctgtaatttgttcaaagaatctcatctggaaaggattcccagaaaaggaggaaaaagaggaaaaaaatggcttctttttttaaagcaaaacatgtctcagatcaagagctgtgtccactttgcctcctagaatgccatgcaaatcattacttctctattgtattacccctccctaaagagtttaactacttgtaaaaattcttatgatagtcaagggtgtctgaaaagtattttttttctatataccagagccctttctacattctttacattgtggctttttatatgccatgcagaattcctaccacaaatttataatctgcactattaaaaatgttccctttgtggctcttgaacatgaaaaggtgtggatactcaagatttctattgggggaaagctggagtcatttgtaaagatggaaaacatgtaatgttgaggttccatctgtattctccattacctctgtgcaaaacaggatcaaggaaatgcttagttaaacaagatgacatttattacccagaaagttctaaaaaaaaaattatcaggagatacctgctctctagggtgctaaagaaagatgatttaaaattactattacaaattatagacagggaagatatctgtatcctgaactttgcataaaactgattttttaatgttaaaattcagactatagtttggaggagcagtatcacagccgtgatgctgtgtcatttcatgtgcatcaacacatcataaaaatatgtcctaggatgggcgcggtggctcagcctgtaatcccagcactttgggaggctaaggcaggcagatcacaaggtcaggagatctagaccatcctgggaatggtgaaaccccgtctctactaaaaatacaaaaaaaaaaaaaattagccgggcatggtggtgggcacctgtggccccagctacttgggaggctgaggcgggagaatgccgtgaacccaggaggcggagcttgcagtgagctgagattgcaccactgcactccagcctgggcagcagagcgagactccgtctcaaaaaaaaaaaaaaaaaaaatttgtcctagtgcagttcatgttaatgattcacttggttaaagagctctctgacagattttgtcactatagagataattattttttcttcattattatcttaatgcagctaatgtgcataaaccatcacagttaatccagcagctgcccttttttcttagttttttttttttgcatacatctgtctttggaaagtcaaagctcttatctttgtttacaggccagaaaaattaggaaaaacacaggttcttccccttactggatgtttgacaaaatattcttcttggccaaaaacattaaccttactggtgagcttgttagaaattcagacaatcagactttattccagatcatctgaaaaaataatctgcattaacaagttctccagtttattgtacacattaaaatttaaaaagtaccttctaactcaacctgtcttttccatctgaaaaatatacacaactcattctgtagaatgtgtatatggcatccaaaaatacacatttttatgcccttaattttatactatatcatccagaaaagtatcatgtatacactggtattgtggatcttatgccactctcttttcttagagttaaaaaatatattagagaatatttctgtgttaaaaaaattattttattttataattttagtcactcctgtaagtcagaaacagttacctgtactctctcatttcaccttgagtaaaattaaaaatgcttttcataaccagttggtaattatgtgtgtgtgtgtgtgtgtgtgtgtgtgtgtgtgtgtgtgtatgtgtatgtgtgtgtatctttcagggaccattgacatttagggatgtggccatagaattctctctgaaggagtggcaatgcctggacactgcacagcggaatttatatagaaatgtgatgttagagaactacagaaacctggtcttcctgggtgaggataacttcaatacacaatttctaatatgccctaaaggttttatttcttttatttgtggaatgtttttctggtaaagtgtgctttgcataaattagtttcagatccctgttttcaagaaaatcttggggattaatacatgtagaaaagaatttctgcaagatgtttcattttgaccttaactttccaaatttctgagctgatctgtatccttcactgtagattactaaattccacaaatttaatggcataaaatttttgcccacaccttaaaatgtaattgccaacaccaatttttgattcaatagtactggatagtaaaattaagaaactgggccaggcttggtggctcacgcctgtaatcccagcacttcgggaggctgaggcggacggatcacgaggtcaggagatcgagaccatcctggctaacacggtgaaaccccgtctctactaaaaatacaaaaaattagctgggtgtggtggcaggcacctgtagtcctgtagtcccagctactaaggaggctgaggtaggagaatggcatgaactcaggaggcggagcttgcagtgagctgagatcacgccattgcactccagcctgggtgacagaatgagagtgagactccatctcaaaaaaaaaaaaaaaaagaacctacaaatcaaaaatattttttaaatatttgaaaatgtctgttataaattagtattttgggattaatttactagctaagcacattactagattggtcattagagaatatgagcaagatttatattatttatttttaataaaacaggtattactgtttctaagccagacctgatcacttgtctggagcaagggaaagaggcctggagtatgaagagacatgagatcatggtggccaaacccacaggtaggtgaaagtgaaaatgaatacagcagatgacacatgagaggtccaaaggccaaagagaaagccagtccttaaaatgtgatttaggaagctgtgttccaaagaaaatagtttctcagaagcctgaggtttctttctttcttttttgctctcacatgggggcatcttctgtcttatacttttaaattttctaaggattctacttttccttcggtgatcttcaagtttgcagttagagccaaagtcctcttcgtggcatataagagactgcgcagtctggctgctttttcattgttttgggggacacacaaatatctgcataattttgaaaaagtctatgttaagcaatatttttaattgtatttttgcatcatgtttgaaatatgtgagtagtggtttctgttccattgggggtttttttgtttgtttttctgcacattccatcctgtttgtattactacattcttgaaatatagtttgaaattataaagtatgatgcccctatgctttgttcttttacctcaagattgctttggctattcaaagtttattatagtttcatgtatgttttagaattgtatttttcattactgtaaaagatgccactagaattttttttttttttatttcgctcttgttacccaggctggagtgcaatggtgtgatctcggctcaccgcaacctctgcctcagggtttctcaatgttggtcaggctgttctcaaactcccaacctcaggtgatccatgtgccttggcctcccaaagtgctaggattacaggcgtgagccaccatgcctggccaccactagaattttgatagggagtttgttgaatctataggttactttgtataatatgacactttaacaatatttatcctttcaatgcatagacataaaatattttaaaatttatttgtgtcttctctagtttctttctatgatatcttatatcttccagtataaaaatgttttacctcttttgttaaatttgttctcagaaatttattattttgatgctattataaataagattgttttctttatcagatagtttgttttatgtatatggaaccctaatttatacttgtatgttaattttatactttgctaatttactgggtgtatttattagtttagacaggttttaatgtactattcatggttttctatatataagattatatgatctacaaccagcaacttttacttatttgtcttcaatttcaatggctttaaaacaatttttttactaattcttctgccacatacttccagtgctatattaaaatagaaacattgacaatggtattgggaatgggtgcttggtgtcacaaaaatcctttgagagacaaaggatctctcagcaaggctagtttactttctgcagaaagagtacactcgccagcagttttgccaagagaatacactaaacaaaggaggcagggtcatttataacctgatgggtccaccctactgctgtgtccggtttccattggctacaacaggacctcacattctgtatttgtcccagttggctagcaacttagaactttctaaaagaggcaaaggcagaggagaacaaaggaaggagggagcaacttgtggatgctgagaaaggtaaaaacacctccagataaggaataggaacaggctatgacctaatgcttgcttggaccagtataagcatgccagggcaaatatttaggctaaaatgtgggagctaagaacacaaagtacattgatttctttatcacggctagcagatatctaagaatgtcagcacaggtgtttgaatacattttgcttctaagagaagttactatttattcctaattacacgaggaggaaagtccctttgaaaaggaacctctatttcacattttacgatgagcacaatatagttttgcattggtgtatatgaatttgaatgagcaaacagctcttcaagtttttggggtttttttgtttgttttgttttttgggtttttgttttttgtttttgagacggagtctcactctgtcatcaggctggagtgcagtggcacgatctcggctcactgcaacctccgcctcctgcgttcaagtattcccctgcctcagcctcccaagtagctgtgactaaagccgtgcaccacaacgtctggccaattttttgtattttagtagagacgaagtttcaccatattggccaggcgagtctcaaactcctgacctcgtgatccacccacctcagcctcccaaagtgcttggattatagacatgagcctcagcgcccagccctcttcaagtttttataaaccagtttcagaaggtaaagatcttctgttgggcccccagggtgacgggatgccctctgagtttatagtgcagaggaattgtagcttgatcagaaggctgctgggtctgcactagggtccgcctttagttggtttgttataagaggcttgggtagctgtaactcccattttatttttggacaaactgaatatccttcaggacttctatatataaggcagacactagggcaggtttctgcagtcgagtctgctaatggcagggcttatatcaggatgtggatgagtatggctttcactgaataccagagagcatttctctgggacactgtgtgggtttctgtgtaggcagaactggccataaactgtggcttagggagctggaactgagtcattaaactgctttggggaccacagtaaaggccaaggtctgcaggcctgtctgcatgtctataaattgatgtcttcctccaggactctggaagggcagggcctctttcatactgtggctgggaggagtttgggatgaccaagctgggtgggccatttctttggtctatagtcaagaacagagtttctgtagattgccacctgaatgagggcctgccttccgaaacggatactcctcaatcttgggctttagcagtttcacaagtccctccctggatctcaaagctcttagaggcacttattttggagatggggtcttgcttcagaacccagactagtcttgtttttttgtttttgagacggagtctcactctgtcacacaggctttagtgcagtggcatgatcttggctcactcccatctcctcctgggtttaagtgattatcgtgcctcagcctcctaagtagctaaaattacaggcacacaccaccacacagggctaatttttgtatttttaatagagacatggttttaccatgttggataagctgatcttgaacttctgacgttaaccttcccacctcaaccttccaaagtgctggaattacaggcatgagccactgcatttgtcctaggatgctcttgaaatcctggcctgaagcaattctccaacctcagtgtaccatgtagctgtcattataggggtgagccatgatgcctggctctctcataagggcatttttgtcaggattggctgaaaaaattttcttgctgttggggcataagaaagtagggcaccttttatttttccatcttgctgatgttactctctatatacatttttctttctattttccatttcaaacttttctgtaattttagattcagacatttagaacaatatgctagaatttacatgttatgcctgaagtaaattatacaattagtaggcactccatatttactaaaatagttacttataaatttaagtttgctgcaggcaaaacggaattataggatattcacccactttcttcagcctaaatctaaataatagcataatttattcccaaatatttgttttatatatcagaggctctaaccatattctgctatatgtgtgtgtgtgtgtgtgtgtgtgtgtatatatatgtgtgtgtgtgtgtgtgtattttatttagcagtttaaggctatttgcttctaaatttggattgcagcactttcattttgtgtaaaaatgcatatatttaaaacaaaatttatctcgtttcttttaaatgattataaaaagtttctcattacaatattctatttatgcttatactgtattttctctgaaattttactgccatacagtgcctgccaatgattcaaagtacctgctttccatgagtacactgtcaaatattgttgtctagacacattctttcttaatggtacatcaatattgcaaaccagagtttaggagtaaacatttattactgtcttgcagttccatattagtgtgttttagtgtaggcttgttttttgttttgttttttgagacagtcttgctctgtcacccaggctggagtgcagtggcatgatctcagctcactgcaacctctgcctcctggttcaagtgattcttctgcctcagcctcccaagtagctgggactacaggcacacaccagcacggctggctaatttttgtatatttagtagagatggggtttcaccatattggccaggctggtctcggactcctgacctagtgacccgcccacctcagcctcccaaagtgctgagattacaggcctgagccaccactcccaggtagtgtaggtttcttaacatcagtttattgtgttttttgcttttacttatgcattataattttaaataacttgcaattctgtatgtacacgttaagtcaatgtgaggtttaattaagatacaaatcagccatatgtctataacaatctgattatatatgtgtgtgtgcttatctataaatatgacccccagtctggagtgcaatggcacaatctcagctcaccgcaacctctgccttctgggttcaagcgattctcttgcctcagcctcccaagttgctgggattacaggcatgcaccaccacacccaggtaattttgtatttttagtagagacggggtttctccatgttggtaaggcttgtctcgaactcccgacctcaggtgatccgcccacctcagcctcccaaagtgctgggattacagatgtgagccactgtgcctgacctcttagctgattttcagtggttgtttcatcttgtttaagtgagtagttatggagatactcttatttttaccatgcgtttaataatgaatatctatttcctttatgtgaaaaaaaaaaaaacactttgtgatatgaaggtaattcctgaaaggatttataattctatattgttttcagtttttttctttagaaaattgtttttaaaacacataaagtttgtcatcttaaatctattgaagtgtacattttagggccaggcatggttgtggctcacatctgtaatcccagagatttggagaggccaagacaaagaggatcacttgaacccaaaagtttgagaccaccctgggcaacatatggagactccttctctacaaaaaatttctttaaaatggcctggcattttggtgtgcacttgtggtccaagatctttggaagattgaagaaagaggattacttgagcctgggaatttcagactatagtcaaccataattgtgccactgcactctagtttaggtgacgaagtgagaccctgtctccaaaaaaaaaatagctttatatttcaggaatgttaagtatattcacattgttatgcaaaagacttctagaaattttacgtcttgtaaaaccaaactcaatacccattaagtaacagcaacccattttaccctctctggtgctcttgacaaacacccttccactttctgtttttatgagtgtgaccacttaagatatctcatataactggaataatatagtatctataattttattactagcttattttaaagggacataatattctcaaaggttatcttaaattgttacaagataatctgttttaagtctgaaaaaatatttcattatatgtatatgttacattttttgatgtgtttataaatcaagggacatctgggttgcttcagttttttggcttatgtgaatactggtacaataaacatggatgctcaaatatgtctcccaggttctgtgttgcatagttcggatatacattcataaatgtgattgctgtacttaatgataattccagttttaattatctgaggaacatttataacattttaaaataatgactgcatccttgttttccaccagttagtatgagttttattttcattgcatcagcaacaaatttggtgggtttttttatattttatagtggccattctgatgggtgtgaagtgattttgtttttcattgttatttttatgcatttctctacaaattagtaattttgtgtttcctttcttccctccccccactcttcctgccccaggtggagtcttgctccaggctggtgtgcagtagcatgaactgagctcactgcagcctctgcctctggggttcaagcaattctcctcagcctcctgagtagctgggattacaggcacatgccgtcacacccggctaatttttatatttttagtagagacggggtttcaccgtgttggttatgctggtcttgaactcctgacctcaagtgatccacccgtctcagcctctcaaagtgctgggattacaggcatgagccaccgtgcctggccacatttcctttcaaatgctttttcccatttgtgtattctttttgagaaaaatttagttcaattatttgttcatttctaaataaaattattcaactttattgttaagttttacaagttgtttatacattctcaatgttaacttctatgatatgtgatttgcaaatatttttagctatttcctaggaggcattgtcactctattgaatgttttctttgatgcgcagaaactttgaagtgtaatgcagttaaattttactgtcttttctttgttgctcatgcgtttaatgtcgtatctaggaaaatagtgccaagacaaatgtcatgtctttcccccttcatttttatatctgggcattttatttaaaaatatttttcatatgtggttcaaggatataatccatcttcatcttatccatgttgatatccagttttcaacattatgtcttgaagaggttatctttttttctattgtgtgctcatggcaactttacaagatcatttgatcatatacagatttctgtgctctctactctgttctttgtttatctgtttttgtgtcagtaccacattgcttttgttattgtagcttttatattattattattaattttttttttttcctgagacagagtctctcactgtttcccaggctggagtgcaatggcataatctcggctcactgcaacctctgcctttcaggttcaggagtagctgggattacaggcacccacctccacacctggctaattttttgtattcttggtagagacggggtttcagtatgttggccagactggtcttgaactcctgacctcatgatccacctgccttggcctcccaaagtgctgggattacagacgtgagccaccttgctggcctattatgtttttaaatcaggaagtataatgcctctgttctttttcatgggtgtttggctatagtttataatcaaattttaaacaatatttctgtaaaaatatgtggtattgggatttctagttagattatattgaatttgtttgccactgtagtttgtattgacatctttgaaaaattaatttttttgaaacttgggcaagaatatgttgaagggtgtgttttatttttacgtaattttggattttccagttttgcttttaattcctagttgcattcagttttggtcagaaaacacacagtgtataatttttgtctgcttaaatttatttgttgttgttgtcattgttattttgacgcagaatcttactctgtcacccagtctggaatgcagtagcaagattttggcccactgcagcctcaaccttctggggtcaagtgattgttccacctcagcctcccgagtagcttggactacagacatgcagtactatgcctggctaattttttgattatttgtagagacagagtctcactttgttgcccagtctagtctcaaacttctggctccaaatgatcctcctaccttggtctcccaaagtgttgggattataggtatgagcctgttcacccagccagtattcttaaatttaataagatttgttatgtgtcctaacagaatacacaaggtgcaaataagaatgttgtgtattctcttgcttttgactgaaaagttttgtacatgtctgttaatcctagttggtctgtgatgtggtttagatgttcgtgttcttcaaatcttatgctgcaatgtaatcctcactgttggatgtggaacctggtgggagatgtttagatcatggggcaaatttctcatgaatggctttgtactatcctcttggtaatcaaaaagtttacactctgttaattcagatgagagctgcctcattaaaagaacctggccccttcacctcacatttggttctgtcttttactatgtgatatgtccagttactgttggccttccaccattgtggaagcttactgaaaccttccaccagaggcagatgccggcacacacttcttgtacagtctgcccaacgatgaaccaaacaagcctttttatttataaattatccactctcaggtattcctctatgtgcaaaataatatattctgtaacgttgtctaagttttctgttttcttattgatcttttgtctgaattttctatttattattaaaaatggggtcttgatgtctacaattattatgttgctatgtatttcttgtttcacttttgtcaatatttgctttacgtattttggagccctaatgttgtatatacatatacacataaataaataggcataatagttttagattcctggtaaattgatccattttactattgtataatatcagtctttgtctcatgctagtacttgacttaaagcatataatgtctaatataattatgagtgtcttactcaattgtggttatatttgcatgtaataaaaagtttttccattctgttactttcagcttatttgactctatattttccagtttgttattggtattaaatattattttatgttgtgtatctattaacagatttatattttgtttttcatattctatagaggaaatttaagagttttatgcaccattattttgataataaataattttatgtgttgatatatttaatagttttttatttatatatgtttttatgatgctgttcagcatcattttattttttaacataatggactcatttagcctttcttttttattttgtatgcagtgtctcactatgttgctcaggctgatcttcaactcctagtctcaagtaagctgactgccttggcctcttaaaactgtaggatttacaggcatgagccactgcctggcaaccatgtagcagtttttgtaggactgtggtaggggtgatgaataccctcaccttttattttgaaaagtctttatttttatcttgtttttgaagtaaagtaattataattagtagtataattattatatatttttatatacttatatattatattaatatataattataaacatattttcaagtagtattggttaagaattttttattacatcataatttggaaagttctcagcttttttaaatcttcaagtaacctctgtattacttttttgctatattattctatgattttttttcatgaatatattgttctacttgatggtgtccaataagttttacatttcatgttttaattttgttttgcacttttatatttttgcgttttatatttaagggtattccagctcacattagttaattgtgtttggatgttttagtttatattataattgtgtatgaaaatatttaactctgcaatttatgacagtgtgaagcaaaatcaaatatgaatcagccatatgtctattgctaatgtgtttatgtttgcttgcctgtataaatattatttctattttcctataacttgtgtatttattgtgtagtttggttgtgaatggttgtttaatcctgtgtaggtgagtagtcataaaaattcttctacttttatcatcttatttgtgaatctatattatttctgtgtgggagaaacacttttgaattttaagataatataaaaactatcattactctgtatcttaggtatttctgtttatttttacttatcaaaaacataaaatttataataaaatatttgtaaatattcaatttagtgatcttaattatattgacattgttttgcaacatatcaccaaaatgtttttatcttgcaaagctgaatctgaatacacattaaacaactaccaattttttccattttgtagcactttccaaacaccactctgttttccttgtctaaggttgtaactgctttaaatatcctatacaatctctgtctttctgtggctggctcattttatttggcataatgtcatcaaaacttatatttacagttgtcagaatatttcctgctttttgaaaactgagggatattccagtattttgttttctgtttttttgaggtgaagtttcacgctgtcgcccaggctggagtacagagtgcaatggcgcgatctcggctcactgcagcctccgcctcctgggttcaagcaattctcctgcctcagcctctcaagtagctgagattacaggcatgcgccaccatgcccggctcatttttgtatttttagtggaggtggggtttcaccatgttggacacgctggtctcgaactcctgacctcatgtgatccacccgccttggccttccaaagtgctgggattacaggtttgagccaccgcacccagcctattccagtaattttatatttcaaattaaatctgctggatggtttaatgacagaaatttgcattgctttcacccattggctttcagtaacaatgctgcaataattatgggtaagtaaatgactctttatatgacatgtacattacgtatgtactgcattctcttattagtctatgttttcagctttatacttataccaagttgttttaattttgtagctttgtactgtgtttgaaatcaggaagtgtaatgcctcaaacgttttttttttttgaagattgttgggtactttattgtcttttgagattccatatacttctgaggttgctgtttctatttcttcaaaaatgcaatgagaagttttaaaaacattgccttaaatgtgtagattacattgagcagtatgaacatctttacagcattaattataccctgattccatttttatcttaaagagtaatttataaaattttagttctaaaaaatttgttaagacttctttttttgtcctaacaggttgtctatcaaaaagaatgtcgtatgagctattgagaaaggtgtatatcctgatgttactgaggagtgttctctatgcctctgttagaagtaattgttttatattgccttaaagttacctgttgccttctaatattctttttttttattattatagaaagtaggtattgaaatatcctactataaaaattatattgcactctatgtgtttcatcgattctgtcaatatttgttttatatatttggaaccttaatgtgagatatacacatgcacacacacacacacacacacaccccacaaatgtatatagaaatttttcagaggttctcagtgagtgaatctattattgtttaatgtccttctttgtctctttggagttttgactttaaagtacattttataaaatatgacagttttaacttaagatgtgttgtgtaatattacttagacctcttctgctctcatttggttaaaatttgcatggaatgtctacttccatcttgccactttcagtctttctttatcattagatcgcaactgactcttgtagaaaggcaagttgaatcctggtttttaatttttttaataaatccctttattgaaagtatgtcttttaattaaaaagttaactttatgtatatttaattttctgaaacagacttacaaatgttattttattgttttagttgattcttgtttctttgttcccaattttctctctctctttctttgtgtcatttttatttttgtactaatatgctttcactttttaaaattttcttttatatctctatacagatttttttgtggtaccttggggtttacataaaatctctaaaagatgcaacagtatatttaattatggtaaaaaatgaactttagttgtatacaaaaaatctttctcattatatctgccctcaactttcttattgatgttgctaattatatctttatgttgtaagtacattaatgagtgtttataataattagtgtttttatttttcaacttttagagaataactaaaaatgttttctgcaccattatgataatgctaaggaattctaattttggatatgtgcatatctttcccagaaagttatgcatttttatgtaataatatgttgttttcttacattatgttatttttagcatctttgatatgtagggcatatgcagtgccaatacactttttttttttttttttttttttttttttactaatttcaggactattacaatatcacatagttcccttctcgcttgcaaaattttcatgacaaatttactagtaatctcataagactatgcttataaatgacacatcacttttatcttgcatctttgaggattttctactttgtgacttgaaattgcactcatgcatgtgtttgttataaatatctttgtgtgtattctagtttgttgagcttcttcatttttacatcattttttcttatattaaaatttttttgtatttttcacctccacaatttctgttttttgatatttttaatatttttgttgttatcctcattcttctaattttcaattgttgtctgtgtttctattttcctcactgaatattattcaagtttttcaaactaatttgtatatctttatttttaatgatagctttctgaaatttttatgtttctgatggggctatgttgccccaatatttttatatgttgtaatctttcattgaaatttagacattaaaaacaaaccacctgtaacaatctttataatatagctttgtcttggcatatctgaaaccaattgtcttggatagagattctgagagtttctctaacatgttcttaggatgtgtcttgtctgaaatgttttaggtcttttttagttaaaggagtttgttcatgtttcttcttaatagtcagtaatcatttgctacaactatttcctgcctataatattgcagtctctttgctgctgtagcatttacctttgatctcagcagactcaaactgccattccaatgtataccatttatttcaagacagaaaccagtgtctggaaaagtccctagaaaccagaaataaaaatgttttttgccgctatttttcttgtcttttataaaagaaaccaagagttgccaatttacttctaaagccactgtgttacattgggcaaccgaaatagctgtgttgtaaatgtaacaaactttttttttcctatgtggctctttgcattatgctcacctggggcactgcacacacttaactcatttataaattttccacaaatgtattttggtcagtatgtttttgttacatttaaatgtctatgaaggatttagggcctatggtattttgctgtgccatcttacttaatgtagtttgtttaattttatatattacatttgtaaactatcttcatctaagtctagcaagtggagtaatttgtcatttttgtttctttcagttatgtgttctcattttgcccaagacctttggccggagcagaatataaaagattctttccaaaaagtgacactgaaaagatatggaaaatgtagacatgaaaatttaccattaagaaaaggctgtgaaagtatggatgagtgtaagatgcacaaaggaggttgtaatggacttaaccaatgtctcacagctacccagagcaaaatatttcaatgtgataaatatgtaaaagtcgctcataaattttcaaattcaaacagacatgagataagacatactaaaaagaaacctttcaaatgtacaaaatgtggcaaatcatttggcatgatttcatgcctaactgaacatagcagaattcatactagagtaaatttctacaaatgtgaagaatgtggaaaagcctttaactggtcctcaacccttactaaacataagagaattcatacgggagagaaaccttacaaatgtgaagaatgtggtaaagcctttaaccagtcctcaaaccttattaaacataagaaaattcatactggagagaaaccctacaaatgtgaagaatgtggcaaaacttttaaccgattctcaactcttactacccataagataattcatactggagagaaaccctacaaatgtaaagaatgtggtaaagcttttaaccgatcttcaacccttactacccatagaaaaattcatactggagagaaaccttacaaatgtgaagaatgtggcaaagcctttaagcagtcctcaaaccttactacacataagataattcatactggagagaaaccctacaaatgtaaaaaatgtggaaaagcctttaaccagtctgcacaccttaccacacatgaggtaattcatactggagagaaaccctacaaatgtgaaaaatgtggaaaagcctttaatcatttctcacaccttactacacataagataattcatactggagagaaaccttacaaatgtaaagaatgtggtaaagcttttaaacactcttcaacccttactaaacataagataattcatactggagagaagccttacaaatgtaaagaatgtgaaaaagcttttaaccaatcctcaaaacttactgaacataagaaaattcatactggagagaaaccctatgaatgtgaaaaatgtggcaaagcttttaaccagtcctcaaatcttactagacataagaaaagtcatacagaagagaaaccttacaaatgtgaagaatgtggcaaaggttttaaatggccctcaacccttactatccataagataattcatactggagagaaaccatacaaatgtgaagaatgtggcaaagcttttaaccaatcctcaaaacttaccaaacataagaaaattcatactggagagaaaccctacacatgtgaagaatgtggcaaagcctttaaccagtcctcaaaccttactaaacataagagaattcatactggagaaaaaccttacaaatgtgaagaatgtgacaaagcttttaaatggtcctcagtccttactaaacataagataattcataccggagaaaaattacaaatatgaaaattatggcaaagctttaatcaatttacaagtcttactaaacataagaaaatttatactggagagaaactactaacctgaaagatgtgacaataattttgacaacacctcagacttataaaagtaatcatactggtgagaaattctaaaaatgtgaagactatggcaaagtctttaaatggttgtcacactttaggtaagataattcatattggaacaaactacaagtgcaaacaatgtggcaaaacttaatttatgctcacaccttactgcacagaaaagaatttttagttgagaaaaagtatacaaatataaagaatgtggaaaagccgttaatatctgctcacatcttactcagcatcagaaagtacttaataaaagcattataaatggaattactgtcaaaagcattcagaaaatataagcctttaatgtgaaaaagagtaaccattttgaagacaaacattgcaaatttaaagagggttgtagtacctttaattgtatcacaaatcttattgtacagattttgtactagaggaaacccctgaagcagttgcttaaattttgtttaaaatcagatttttttttttttctttttgagacggagtttcgctcttgttaccgaggctggagtgcaatggcgcattctcggctcgccacaacctctgcctcccgggttcaaccgattttcttgcttcagcctcctgagtaactgggattacaggcatgtgccaccacgcctggataattttgtatttttggaagagacagggtttctccatgttgttcaggctggtctcaaactcctgacctcaggtgatccacctgcctcagcctgccaaagtgctgggattagaggcatgagccaccacacctggccaacatcagaggatttatatttgagaaaaaccctgcaaatgtaacaaattttgaaaaactttttcaaaaactacagcttaaaaagcagcagaggattcatactaaaatatatttttgcagatgcagtagatataaaaatatatttaatccaaagttaagtttatgtaaatatcagaggattcacagtagaaatatctaaggtgctggcacttcagacaccacactaaatcagagtgctgagtatagaaaataatccaaaactaaatttggtggattaattatttgtatataactttaaaagaagtagaactttttttgcagagttttaattacattcaaagtatacttttttccttaaaaaagttaggtttttttgaaaagaaaataatcatgtcattcaactttcaaattacttcatgctctttcttcttcattgctattatattcacatgtgaaagcatgtgatcagtggttgctacatcaaagataggagatttttttttcttaggtcattatttatgaccttttctattaaagaataagaacattaggctgggcgcagggctcatacgtataatcccagcactttgggaagctgagacaggcagatcatgaggtcaggagtttgagaccagcctggccaatatggtgaaaccccatctattaaaaactacaaaaattagctgtccactgtggcacgcacctgtaaccccagctactcgggaagctgaggcaggagaatcacttgaacccaaaaggcagaggttgcagtgagccgaggtcgcaccactccacactagcctgggcaacagagcaggactctatctcaaaaaaaaaaaagtatactattctttttttttctttatttattttattttttatttttttattgatcattcttgggtgtttctcgcagagggggatttggcagggtcataggacaatagtggagggaaggtcagcagataaacaagtgaacaaaggtctctggttttcctaggcagaggaccctgcggccttccgcagtgtttgtgtccctgggtacttgagattagggagtggtgatgactcttaacgagcatgctgccttcaagcatctgtttaacaaagcacatcttgcaccgcccttaatccatttaaccctgagtggacacagcacatgtttcagagagcacagggttgggggtaaggtcatagatcaacagcatcccaaggcagaagaatttttcttagtacagaacaaaatgaagtctcccatgtctacttctttctacatagacacagcaacaatctgatttctctatcttttccccacctttcccccttttctattcgacaaaaccgccatcgtcatcatggcccgttctcaatgagctgttgcgtacacctcccagacagggtggcggccgggcagaggggctcctcacttcccagaaggggcggctgggcagaggcgcccccccacccaacttcctggacggggcggcggccaggcggaggcgggccccccacctccctcccggacggggcggctgccgggcggagacactcctcacttcccagacggggtggctgccgggcggaggggctcctcacttctcagacggggcggccgggcagagacgctcctcacctcccagacggggccgcggccgggcagaggcactccctgcatctccgacgatgggcggccgggcagagacgctcctcacttcctagacgggatggcggctgggaagaggcgctcctcacttcccagactgggcagctgagcagaggggctccttacatcccagacgatgggcggccaggcagagccgcgcctcacttcccagacggggtggcagccaggcagaggctgcaatctcggcactttgggaggccaaggcaggcggctgggaggtggaggttgtagcgagccgagatcacgccactgcactccagcctgggcaacattgagcactgagtgaacgagactccgtctgcaatcctggcaccttgggaggccgaggctggcggatcactcgcggttaggagctggagaccagcccagccaacacagcgaaaccccgtctccaccaaaaaaatacgaaaaccagtcaggcgtggcagcgcacgccttcagtcgcaggcactcggcaggctgaggcaggagaatcaggcaaggaggttgcagtgagccgagatggcagcagtacagtccagcttcggctcggcatcagagggagaccgtggaaagagagggagagggagaccgtggggagagggagagggagagggagaaggagaagtacactattacgtatgctccagcctgggtgacagggcgagactccatctcaaaaacaaaaaaggagcgcaccagcatggcacatgtatacatatgtaactaacctgcacaatgtgcacatgtaccctaaaacttaaagtataataaaaaaaaagaaaaaaataaccattgtaccaccaaaaaaaaaaaaaagaataagaacattaaaacgtaagatgcatgatgaaaatctaagtggtggggctctttgtggttaacataatattgagtgatatatgaggtggttgtttagagtaatattcttctgcattatagtaaatgaaaaacatttttaatattagttaaaattagtaatatattattttactaattatatttctatgtaataaaatgcagtacgtttttaaattttcagactacatgtaaacttagttttataattaaacttttttaaacatattatgatcattgtgcattcaacgatgcgttgtgatgccactaagtttaacctatctaccgtactcaagaatgtagttaaaagatggttacagtgtgcaggttggtaacataatgaactaacatctcttttgccagtggctttaaactgcaaataggttaaagaatattgttcttgtaggttaaatttttattctttttttcttatatgaacttatttttaaaaatttttgtgagtacatagtatgtgtatatatttataccatatatagaatattttgatacaggcatataatatgtaacaatcacatcagggtaagtgaagtatccatcacctccagcattaccctttgtattacaaacctattctacacatttagttcttttgaaatgtgcaattgttattggttacagtaaccaatttgcatggaatgtctatttccatctggccactttggcaagtggcaagattttggtcatgattttgttttatggtcataataagaattgtatagaagtattaataaaatccatacatttctgaattctgaataaacatttaaaaatttgttaatatttttctttaaacatgtggtcttactgcctgcaaacacatacagactcttaatttttatttacatagatgtaaatatacacatatattactctaaagataaaccttaagggtaagaaaattataaagtatgtgtgtttttgtgaatatgaatttgtacctatattcagaagaaaagagcaatattggcacaaaacaaatcatcttaataaggtaactaattggctgtgtgcagtggctcacgcctgtaatcgcatcactttgggaggctgaggcgggtggatcacctgaggtcaggagttcgagaccagcctgaccaatatggtgaaaccccatctctactaaaaatacaaaaattacctgggtgtggtggtgtgcacctctagtcccagttactcaggagactgagacaagagaattgcttgaacccaggatttggaggttgcagtgaactgagattatgccactgcactccagcctgggtgaaagagtaagactcatctcaaaaaaataataaggtaactagtttactagaaaactgaatacctcaaaaatgctgaaaacaaatgtatactgtctgctttgtgttaaatttattactgtaatatcttatggtttatagttcagaatcttcccatgcaaatattttgttttgacttgcctgatactcatgctggacctataattttcttttttttataattttttttatagtttctgaggcattatgtgagcttgtcagggattataatgcttttataaaatttagtagtgcacacaaaataatatttatatgtaattccaaaattagtctatcaagttatattttattttcttagaacatttcatttgttcttttaattggagaactctttaaacctgctttagttgttgttcttttcactttttataattgaaataactatatttatttattgagccaatttttttttcaggtaaatactaaggatgctttataagtcatgaggatgtttttatatataaatatagcaaacaaacatgagagtgcttgctgtgtaacaaatgctgcataacaagctataaatattcctgctgaagttagtttgtaacttcaagtcagagatggaaaatatcaatggtgaaaaaataatattgatttttcatgttaaaaagacactttttccaggctacaaaactaactcttgctgaatttgaagagaaattcttcttcctttattttctaagtatcttttgttttattatgtgtattccagctatgtatgcatcacagcccttctccttctttttcagtattatatctatggttttctcattgttgtctttatgccatgtcattttacatggtactttgtaggttttgatgagaaagttggtatttttttaatgtactaaaaaattagttttaactggagagtttgtcaatacaactttcagatcagttaattaagataaaaggcattcagtatccacaggtgagaggaataagtcagttagttttctttttttctgcttgtaaaagaaaaaaaatcttacacaaagtgtggcaaatatttgctaaaaaatatatctcagaaattaaatttttaagaaagctaatggtgagtgaaattttttaaatttaattttctatgatatagcacaacttaacgtttccgtgcagaatcttctatttttaagtgtgaatgttaaagtttgtaaaataataaaatgacctctgtggatttaaaatttggaataatatttcttttttatattgatattacaatttgaaaaaatctctcagtcttatataatttttttagtgggtgaagttcagtctagagtttctattctttgtcacataactgtagccaacttattgatcattttctctgtaaaacttggagatcatgacagcttttggattgaaacatatcctattagtttgctcacaaacttgtttactgtgttcgaagagtggccagtcatgagaccaaagcaacaactgcccttttagtgtcttttatgcagttattatctgtaataaataaatatttattctgtaaaacatgaattttgaagtgtgtatacattgtcaaatgtttaattctaggtaattaatgctttacctcacatagttaacattttttgtggtgagagcacgtgacatagtcttagcacttttcaaaaatacaaatacattattaggaactatagccaccatgctgtagaaaaaatcttttgaaattatttctcctattcaagtataattatgtattttttgactgacgtctttccaaaccccccttctaaataccttggtatctggtggtcaccattttactttctacttccatgagattacgttttttgaggatccgtgtgtaagtaaaattatgaaataatctttctaggccgggtgcggtggcttacatctctaatgccagctctttgggaggccgaggcgggcagatcacaaagtcaggagtttgagaccagcctggccactgtgatgaaaccccatctactaaaaatacaaaaagtagctgggcatggtggcgggtgcctgtagtcccagctgaggcaggagaatcgcttaaacctgggaggcagaggttgcaataagctgagattgcaccactgcactccagcctgggcaacagagcaagactctgttgcaaaaataataataatcttgatgtgcctggcttatttcaggtaatgtaatccatctgactgaaaataatagaattttcttttttgaaggtgagtagtattccattgtttaaatatatcatacttttttttttttctttttgagtcagagtgtttctctgtagcccaggctggagagcaggggtgcaatctcggctcactgcaacctcccgctaactaacttttatatttttagtagagatgagttttcaccatattggccaagctggtcttgaactcctgacctcaagtgatccacccgcctcggcctcccaaagtgctgagattacaggcatgagccactgtccccagcctactatattgtctttatttactcatttgatgttaaactgttgattctatattttgacaattgtaaagagtgttgcaaacaacatagaagtgcaaattttttttattctgattgttttggatatatatccaatattacaattgctgtattatatgatagttttaaattttttgagacttctctattttttatttatttatttttgtttgtttgtttgttttgagatggagtttcactcttgttgccaggctggagtgcaatggcatgatctcggcttaccgcaacctctgcctcccaggttcaatcaattctcctcccttagcctcccgagtagctgggattacaggcatgcactaccacgcttggctaattttgtatttttagtagagacagggtttctccatgttggtcaggctggtctcgagctccagacctcaggtgatccacttgcctcggcctcccaaagtgctgggattacaggcatgaggcaccgtgctcggcctattttatttttataaaggctgttctcatttacactcaaaccaacaatatgcaaacattctttttcctttttctttttctttttttttcaagacggagtctcgctctgttgcccaggctggagtgcagtggcaatctcggctcactgcaagttccgcctcccaggttcacgccattctcctgcctcagcctcccgagtagctgggactacaggcacccgccaccacgcctggctaattttttgtatttttagtagagatggaatttcactatgttagccaggatggtctggatctcctgaccacgtgatccacccacctcagcctcccaaagtgctgacattacaggcgtgagccactacagccggcccccaagcattcctttgtcttcacacctttactaatttttttctttttaataagagttattctaacaagtgagttgatatcatagttttttctcttttttttttgcttttcctggtaataattgatactgattattttttatatctcttgcctatatgtcttttttgaaaaataagtctttaattcatttttaatattattttttattctataattgagtttcttatatattttgatattaaacccttgtcacatgtataatttgtacatattttctcccattttttagttttctcatcctgttgattgtatcagattctgtgcagcaactttttaatttgaagtaatctgactcctctaatttttctttggttccctgggattctgagattaaattttagaaagtcactgcccagaccaatgttatggggctttcactgtatattttttgtagtagtttcatagtttcaagccttacatttaaatatctaatttactttaagttgatttttatatatggtgtgaaatgagggtctcattttattgctctgcatgtggctatacagttttctcaacatcatttattgaagacattgtcatttccctaaaagattgtcacctgttaatataatcagctgtaagtaaatgaatacatttctcatttctctcttctgctccactggcctatgtgtctttttttattgcagtaccatactgttttggttactatagctttgtagcatatttcaaagccaggtagggtaatacattcagccttttttgttttgtttgatcgcttttgctactcagggtcttctgcagcaccatataaattttagatagatatttttaaattcctatgatgtttgtcactggtattttgatagaagttgcattatatttgtatatcattttgtataatgtaggtatttaacaatattaatgccaattcataaatattttcatttgtgtattatttattactttaatattctttagattataatgtaaggtgtttcaactttttggttacatttatctcaaagtgtagttactacagttattgtagataggattgttttttaattttattttgagatagttaattgtttacaaaaatgccactgacttttgcatgtggattttttattctgtaaatttaatgaatttattagtttctagtagttcttagtaaagtcttaggctttcctatacttaagattatgtcttctacaaatagtaataattcaacttttttttccaatctggatgcctttgattttattctctaatttctctgtcttggacatttcgtactatgtttagcaagactgaagaaagtgggcatccttgtcttgttctaactttcagagtaaaagcttacaacttttccctgtttagtatgctgtttcctgtgcactttttgttatatgtggcatttattggcttcaggtgcatttttcctatacttaattttttcagagatttatcattagggaatgtgttaaacttttgttctgcatctatttaaatgttgagttgtgaaatcacagctaactccacataaatacaaaacatcctcagagactactatgaacatctccatgcatgcgaagtaaaaaatttacaggaaatagataaactggatacacacaacctctcaagattgaaccagaaagaagcaaacatcttgaacacagcaaaaattaataaaatgtataatgaaattataaatttagcaatagaaattatacattatattatagaatagtaatagaaatcatacattagtaatagaaatatatacattggtaatagaaaacccgcgaaccatgaatagccctagatcagatgaattcacaactaaattctaccacatatacaaagatgaaccagtactaatcctctgaatgtactccaaaaatcaaggtgggatttcttcctaactatataaaaccagtatcaccttgatatcaaaatctagtgaagacacaacaacaacaaaaactataggccaatattttgggtgatcattaaaacaaaagttctccataaaatactagcaagctgagttcataatcaaatcaaaacgttattttaccacaatcctgggagatttacttcatgaatgcaaggatgtttcatcatatataagtcaataaatgtgattcatcaggtaaagatgattaaaagctaacatgattatcacaatagatacagaaaaggcattcaaaaaatccaatacctataaaaatattctcaacaaactaggtattaaagaaacatctcaaaatagtaaagccatctgtgacaaatctgcagctgaaatcatgctgaacaggcaaaagctggatgaactctccatatgaataaaaataagacaagaatatccactcttaacactcgtattcaacatagttctggaagtcctagctagagcaattaaacaagataaagaaataaaagagatctaaataagaaaagagaaagtcaaattattctcacagatgatataattctctacctgggaaactttggagatgccacaaaaagacccctaagcctaaaaaatgacttaagcaaagtctcaggatacaaaattaacatacacaaatgagtagcatttctgtacatgaataacattcaagctgagaacaaaataaaaaacacagttctggtcgtcagcaaagcctgagtcctgtcctcttgctctcctccctggacagcataagcttcaccactcgctcaaccttcaccaattaccagtccctgggctctgtccaggtgcctggccagtcagcagcacagccatcatctatgcaggcatggggggttctggttccaggatctccgtgtcctgcttcaccagcttcaaggcccatggggttcaggggcctggctgcggggatagccaggggtctgacaggaatgggaggcatccagaacgagaagaccatgcagaccctgaactactgcctggcctcctacctggacagagtgaggagcctgaggaccaagaaccggaaggtggagagcaaaatctgggagcacctggagaagatgggacctcaggtcagagacaagccattacttcaagaccatcaaggacctgagggctcagatcttcacaaatactgtggacaatgcccacatcgttctgcagatcgacagtgtccgttgtggggaaaagaaagagagatcagattgttactgtgtctatgtagaaaagcaagatagaagaaactccattttgatctgtactaagaaaaattgcttctgctttgagatgctgttaacctgtaactttagccccaaccctgtgctcacagaaacgtgcgtaatgaatcaaagtttaatggatttagggctgtgcaggatgtgccttgttaacaatatgtttgcaggcagtatgcttggtaaaagtcattgccattttccattctaaattaaccagggacacaatgcactgtggaaagctgcagggacctctgcccaagaaagcctgggtattgtccaaggtttccccccactgagacagcctgagatatggcctcatgggaaaggaaagacctcaccatcccccagcctgacacccataaagggtctgtgctgaggattagtgaaagaggaaggcctctttgcagttgagattagaagaagtcttctgtctcctgctcatccctgggaatagaatgtctcagtgtaaagctggccattcccattcattctcttctgagataggagacaaccgccctgtggctagaggcaagatatgctggcagcagtactgctctgttgctgtttgctatactgagatgtttgggtaaagagaaacataaatctagcctacgtgcacatctggacacagtacctttccttgaacttattcataatacagattcctttgctcacatgtttccctgctgaccttctccccacctgttgccctgttacactctcctcgctaagatagtaaaaataatgatcaataaatactgagggaactcagaggctggcgccagtgtgggtcctctgtatgctaagcactggtcccctgggcccactgttctttctctgtactttgtctctgtgtcttatttcttttctcagtctctcatcccacctgacaagaaatacccacaggtgtggaggggctggcccccttcagtccatcttgctgctgatgactttagacccaagtgtgagacagagctggccatgtgccagtctgtggagagcaacatccatggctttgcaaagtcattgatgacaccaatgtcactcggctgcggttggagacagagatcaaggttctcagggaggagctgctctttatgaagaagaaccacaaagaggaagtaaaaggactacaagccaaggtcgacagctctgggttgaccagggaggtagttgcccccaaagctcaggaccttgccaagatcatggcagacatccaggcccaatacgacgaggtagctcagaagaaccgagaggagctggacaagtaccagtctcagcagattgaggagagtatatagtggtcaccacgcagtccaccaaggttgtagctgctgagatgatgctcacagagcttagatgtacagtccagtccttgaagatcgacctggactcaatgagaaatctgaaggccagcttggagaacagcctgagggaggtggaggcatgttaagccctgcagatggagcagatcaacaggatcctgctgcacctggagtcagagctggtacagaccctggcagaggggcagtaccaggcccaggagtacaaggccccgctgaacatcaaagtcaagcaggaggctgagatcgccacctaccaccgcctgctggaagatggcgaggacttcaatcttggtgatgtcctggacagcagcaactccaagcaaaccatccaaaagaccacaacccgccagatggtggatggcaaaatggtgtctgagaccaacaacaccaaagttctcagacattaagccagcagaagcagggtaccctttggggagcaggaggccaataaaaagttcagaggtaaaaaataaaagaacagaattctatttacaatagccaaaaacaaaaaataacatacttaggaatacattaaacgaaggaggtaaaatatcgctacaaagaaaacacactgctgaaagaaatcagacaaaacacaaataaatggagaagcatttcatgcttatgaatttgaagatttaatataattaaaatgtccatgccacttaaagcaacctgcagatttttattcctatcaaactatcagtgccatttttatagaaatagggaaaaaagctattctaaaatttatatggaagaataaaaaaagccaaaatagccaaggcaacattaaacaaacaaacaaaataaaacctggaggcctcgaattacctgacttcaaactgtgctacaagctacagtaatcggtataacatggtcgtggtacaaaaatatacatacagactatattggtacatttttatgctgctaataaagacacacctgagactgggtaatttataaaagaaaggtttaattgactcacagttccatatgactggggaggcctcacattcatgatggaagccaaagggaaagcaagacatggcagcaggcaagagcaagcatgtgcagaagaactcccttttataaaaccatcagatcttaaaagacttattcacgacccagagaacagcatgggaaaaacccacccccatgatttaatcacctcccacccagaccctccaatgacatgtggggattattacaattcaaggtgagatttgggtggggacacagagccaaaccatgtggaacagaagagagagccctgaaataaagctacactcctacaacctacttttgacaaagtcaacagaaataaaaagaaaataactccctatctaataaatgatactgggaaaactcgttagtcatatgcagaagaagaaaaaaaactcttcctcccaccatataaacaatatatctcaatatagtttaaagacttaactgtgagacttcaagctattaaaactctagaagaacatgcagaaagtactcttctagacacagggctctagaaaaaaaattataactaacaccttagaagttaatgcaacaaaaataaaaacatgttgaggttgtggagaaaagggaatctatatacactgttggtggaaatgcaaattaattcagcccctgtagaacacagtttgaagatttctcaaatagctaaaaatagaatagctatttggcccattaatcgaattactgggtatatacccaaagaaaaaattattttaccaaaaagacactggcactcacatgtttactgcagcactattcaccataaaaaaagacagaattaaagtaggtacccatgaatcttagattcatgttctttgttaatttgcttagaataaaggccttctgccagcttggaggacagcctgagggaggtggaagcccactatgccctgcagatggagcacctcaatgggatcctgctgcacctgtagtcagagttggcacaggtccaggcccaggagtacaaggccctgctcaacatcaaagtcaagcaggcccaggagtacaaggccccgctgaacatcaaagtcaagcaggaggctgagatcaccacctaccgccgcctgctggaagatggcaaggacttcaatctaggtgatgccctggacagcagcaactccatgcaaaccatcaaaaagaccaccacccgccagagaatggatggcaaagtgctgtctgagaccaatgacaccaaattgagacattaagccagcagaagcagggtactctttggggagcaagaggccaataaaaacttcaaaggtcaaaaaaaaaaaaaaaagaataaaggccttctgctgcatccatgttgctgcaaagaacatctttttctgtggtttcttagtattgcacggtatatacgtatttcagatactacatgttctcacttataattgggtgctaaacattgggtgaacatggaaacaataaatgctgggagttcttaaaaaaactgccaagaccagcattgaaaaactacttatcaggtatgaggtacactacttggacaatggaattattaagtgcccaaacttcgacatcaggcagtatacttatgttacaaatctgcccatgtaccctcatgaatctaaaataaaaataataaaatgctttgtggtataatggcatgttatatttctccagttctgggttaatagttgaaattaggagtgaaagacacagaattatgtccgttttgggtacagaggtgaatgtttttatacctggtcgccccacgttttatgacctaacgtctctgaaaacccttggtttatagcccaaaaagtgtcttatccccaagtatgcagctaaaataaatggccacatctttatattgtatttattaactgtacactagattataatttgtcactctactctttttggggaaaaaatggtttaatcacatttctcttttagaataaaccatttttgaaaatgtgaggctgtgaaaatcatgttaaattcctgaattaggaaaataattttttttcttttttgtggagtctagctctgtcacccaggcttgagtccagtggcgtgaactcagctcactgcaacctctgcctcccaggttcgagcaattcttctgcctcagccctctgagtagctgggattacaggcacctgccaccatgctcagttaatttttgtatttttagtagggatggggttttgccatgttggccaggctggtctcaaactcctgacctcaggtgatctgtctgccttggactcccaaagttctggaattacaggtgtgagccactccacctggcaagaaaacatttatttttaagcataaaagtcttatggtcatagaccaaaaatgacaaagtacacggtatgggttatttatgaccacactgctgcaaccactctatcacaaccattctggtgaaataataataataataataatggattagaaggtacttttagaatatctttctgattctattgcaatgttaaattcttgtctttattatttgtcatatagaagtctgtacttcaacaaaagatgccaagaatttcaagttaatatcctcacacatatattctcactagaagggcactggtgtgtttgcaatcagggtggagcatttctggctttgcttgtgctactttgattgtctaaaatagaaagacaggaagtaaagtggagtcagccatgacatattgagcttctacagcaacaacatctgaattcttgtgttacgtcaactagaagtaatgacagtattttattttattttgttttatttatttatttatttagagacagagtttcactcttgttgcacaggctggagtgcaatggtgcgatcttggctcaccacaacctccacttcccaggttcaagtgattctcctgcctcagcctcctgagtagctgagattacaggcatgcaccaccacacccggctaattttgtatttttagtagagatggggtttctccatgttggtcaggctggtctcaaactcccgacctcaggttacctgcccacctcggcctcccaaagtgttgggattacaggcacaagccaccacatccggcctgttattttactatatttatttttaaaattgtaattcatttatcctgaatatatcactgggcccagaacctaggtgatgtgactctcctgcattatctctgcccataagtgggattattaaatatacctgggcctacataggtatacagatgctacaatgactcatatacctggacacagccaagagaagagattttgactctcataggttggcttacaacaatggataaggtcctgggtctcctacttgtaccaaagtcaaagagaataacaacattcacacatatcatataaattcctcaagtggcaccaaaagtgtcaacagggccaaccatgctgaagagactgtgactctcctatgcacacccagctgactgtaaggactgtcacccttccagatggacacagaccactgtggaggttttgaatgtcacaccaagagtgagtcaaaggttggaattgtgactctcacacatggatgtggtccacaggtggaataatgactcttggacctcaggtggaattggggctctcatgcagggattcagtccagcattcagactgctttgcattcttggacccaacccacaggagatactggctctcatacataacccgggatatgtgcaggattgtaaatgtcatccctggacctttctgcgggtgtaattgtgacagatatttttgcctagaatctgaatgatttgactctcctgcctgggccaagcccacaaatgtgattgtgacatatactcaggccaagcacctaggttatgtgactctcctgcctgagccctgccctcaagggaattgtgacatatcattgaacccagcacctaggtgatgtggctctcctctcctgcctgggccctgcctacagagaaaattgtgacatattcctcgacccagcactcagataatgtgactctcctgcctgtgcactgcctacacagggcatggtggcctatcgccaggcccatcaaccatgtgatgtgaatctcctctctgcctgagccctgccctaaggattgtaaaatattgctgggctcagcacccaggtaatgtaaccttcttgctttagcactgcccaaaggagaaattgtgacatctatctgggccaatcttctaggtgatgtgaatctcctctcctgccccctccctgctctgggactatgacacattactggactcagcacctaggcgatgtgactctcctctcctgtctaggacctgcccaattggtgactgtgacacatcactgggcctagcacctaggtaatgtgactcctcttttgcctggcccctgaccacaggttgcattgtgacatatcactgggcccagcacccagatgttactcttcttctgcctgggtttgttcacagatgggattgtgacatgtgcctgagcccagcatctaggtggtgttagtctcctctcctgcttaatacctgccctgggtaccgggcaaggcaatatgtcacaatgccccctgagatcagggcccaggaaaaaagtcacatcacctgtgtgctgtgcccagtgatgtgtcacaatgtcccctggggaatagagttcaggaaggagagtcacatcacctacatgctgcatctagtgatatatcactttcctgcctaggctctgcccacagaaggctttgtgacagatctatgggcctgtaatctaggtcatttcacttattttggggggaccttatgcacaaaagattgtgacatatttctgggcacagtacacaggtgaggtgacactcctgcctgggcctggcccacagaaggaattatatcactgcttccatcacctaggtgaggtaactcacctctcctgcctgggccctgcctaccggaagaattgtgacataacactgggcccagcacctaggtgatgtgactcttttgccttgttccttcccacaggtgagagtgcgacatacctgggctcaactcacagctgtgaaaataactcattcttgtacccagccaataggagagattttgattctcatagatacatttagggcaactggtaaggtcctgggtctcttacttttatgaagataacagaggattatgacactcacacatatcatataaagcccttgagtggtacagagagtgtcagaacataggagcagggcacagtggctcacacctgtaatcccagcactttgggaggctgaggcgggcagatcacctgaagtcaggagtttgagaccagcctggccaacatggtgaaaccccgtctctactaaaaatacaaaaattagccaggtgtggtggtgcatgactgtaatcccagctactcgggaagttgaggcaggagaattgcttgaacccgggaggcagaggttgcagtgagccgaggttgcgccattgcactccagcctgggtgacagagcaagagtccgtctcaaaaaacaaaaacaaaaacacagcactcagatgagattatgactctcatattcacactcagctgccagaattgtcaccctcaaacatggacacagcccactggtgaggtcctggatctcacaggagtacacagttggaattgtgactgtcatacgtaggcctggccacaggtgtgacgctgactcatttctggacacagcacacagggacaatgatgactttcatacctgaacccaaccaataggagagatgttgactcttgtacctaggacaatgagtaagatcctggctccataccagcacaaatttccagagcagatagcaactgtcttgcacactgtataaagcccttgggttacacagagtttcataacatggcccagcacacagaagcgattgtgactctcatatgcacacccagccaacagtaaggattgtcaccctctatcataaagccaccccgctgtcgaagttcttaatctcacacctggattcagtcaaaagttgaaattgtgactctcctacgtgaatgttttccacagttggataatgactctcagaccaggattcagaacactggtgaggctgtgactcctttactgaaacacagtcccctgcaggcaggattggggatcttatgcacaaatccagctaacccttaagactgactcatgtacttggaccaaactcacaggcattgactctcatacctgaagccaggacatgtgtggaattgttaagctcttctctggacctttccacagatgtggttgtgagatatatctttgcctagtacctgagtgaggtgcttctcctgcctgggtctggctcctaaataggattgtgagatatacctgggcccaagctctcaggtgatgtgactctcctgcctgggccctgtcataatgggggattttgctataatgctggacatagctaggtgatgtgactctcctgtcctatctgggctctgctcacaggtgagattgtgacacatcgctgagcccagcacccaggtgatatagctctgctgcctgggccctgcccacacagggcattacggtatattgccgggccaaacacccagtaatgtgactctttttctgggccttgtcctcagggtgcatggtgatatatcactggatctagcacacaggtgatgtaaatctcttgcctgggtcttgcccgtaggagatattgtaacatatcgctgggctcagcactcaggtgatatgcctctcctgccagggctctgcccacagtagggattgtgacatattacaggggccgacacctatgtgatgtgtctccttttctcccttggtcctaccctcaaagaagattgtaacttattgctgggccaagcacccaggtgatgggacacttcttcctgggccctgcccacagaggaaattgtaacatatttctgggcccagaaccaaggtggtataattattttgccttagctttgcccacaaaaaggattgtgacatattcctggcccagcatccaggttatgtggctctcttgccctgtctctgcccacatgtgggattgtgacatatcagtgggcccagaaccaaggtgatatgagtctcctgtctgtgctctgcccacaggggagattgtgacacattggtgggctcggcatccaagtgatgtgagtgtcttgcttggattttacccaaagagagtattgtgacacacctgtggatgtgacttttctgcttgatccctgcccacatttgaaattggggcctacacctgtttccatcacctaggtgatgtagctctccttcctggtccctgtccaaagggaggattgtaacacacctgcttccagcacctaggtaatgtgactttcctgcctgggccctgcctccaggtaattgtgacatatacctgaacccatcttctgagttgtgttgctcttcctcctgggtcccacccagagggtagattgtggcatgtacctgggtccagcacctaggtgatgttacactttgcctggacctagaacacaagaaaagattttgacagatttcttaccacagcacctaagatatgtgactccgctgcctaggctaaagccacaagtgggattacataatactgggccgagtactgaggtgatttgagccttttttaggtcaagttctcagggggactgacatatacctgggctcaggaattaaggtgatgtggctgtcctgcatgggcccaatccacagagaacattgtgacatatacctgggcccagaccataggtcatgcgactctctcacctaggtcaaggccacaaatgggatagtgacatatagttgaaccaagcacctatgtgttctgactctcatgcctggccaaagtcacaaggggcattgtgacatatacctgggcccagcacttagatgatgtgactctttagcctgagcccaccccacagggagtattgtgacacatacctgggctcaacacctatgtgaggtgtacatctaacctgggccaagccaacaaaagagattgtgacaatataccagggctaagcacctagacaatgtgtctctcttacctgggacctgcccatagtggggattgtgacacatacctggtacctaggctatgtaactcttctgcctgggctgaggccataggtgggattgtgatgtagagctaattccagaacctaggtgatgtgaatctccaacatgagcccaagcaacaggagggattgtgacacatacctgggcccagtacctaggtgatgtggctctcttgcttgggacctgccaaacaggggactttaatatacctgggccccacacctaggtgatgtgactcttctgctgggcctcgaccataagagagattgcgatatatacatgggcccagccttcaggtgatgtagctcttctgcctgagccaggctcacagggggaattgtaagatttagctggacccagctcacaggcaatgatgactctcatacctggacccagtgaagaggagacattctgactctcatagctagccttaaggaaataggtaaggtcatggatctcatacttgtacaaaagtcacagagaggtttgtgactctcaagcatatcacgtaaaactctcaggtggtagagtgtcataacagtgcccatcacgcaagtgagactgtggctctcatgcactcccagttgaaagttaggattgttactcttacacatggacacagctcactagtgaggtccccaattttatagccaaacatactggacagttggaattgtgactcttctatgtgaatcttgacacaggtgggatggtcattcatttttggaccaagcccacaggcatgatcatgagtctcatacctggacccagccaataagaaacatttttggccaggtgcggtggctcatgcctgtaatcccaacactttgggaggatgaggtgggctgattacgaggtcatgagtttgagacaagcctggccaatatgatgaaaccctatctctactaaaaatacaaaaattagccaggcgtggtggcacacacctgtagtccctgttacttgggagactgaggcataagaatctcttgaacccggaaggcggagtttgcagtgacctgaaatcgcaccatcgcactccagcctgggtaataaagcgagactctgtcttgaaaaagaaaaaaaaaaaagaaacattttgactcttctgttgggcttaaggccacaggtaagatcatgtgtctataccatcatgcaggtctcagggaagattgcagctctcatgcatgctgtataaagcacttggttggtacatagagtgtcataaaagaacccagcacacaggaaaaattgtgattcttgtatgcatactcaaccaaatgttagaattatcagcctcacacatgcacacaacccactgttgaggttctgaatctcacacccagaaaagttgacagttggaattgtgacactcatccatggatggagtccacaggtgtgatggttaatactgaatgtcaacttgattggattgaaggatacaaagtatttatcctgggaattgagaaaataacaaattatcccataacatttactaattatctgaagatagatcctcagaaaatatattactgggttaaatgatgtctatgtaaactgttcacagttacagccagatgactttccaaaagggctgtagcaggtccatcggcgctggcattctctgatgcacctgctgctctgtatctaagctctcctgcatattacattcttttaatttttgttgtcagtttgtgtctatatggcaaataaaatctcattgtccctttcactttcagtttttaaactgacacgtttgagtcacctttcagttgtttaagacctattaagattttctcttttttgagtcatctgctcagatctttggccctgtgatgggcattctcccaccctggagttttccagcatttgcccctttgccagttctgggattgttgtagttatttctccagactccctttaatattaaagaaaaaaaagcaattggccgggcgcggtggctcacgcctataatcccagcactttgggaggctaaggtgggcggatcatgaagtcaagagatcgagaccatcctggccaacattgtgaaaccctgtctctactaaaaacacaaaacgtagctgggcatggcggcgctcgcctgtagtcccagctattgtggagcttgaggcaggagaatcacttgaagccgggaggcagagactgcggtgagccaagatcatgccactgcactccggcctggtgacacggtgagactccatctcaaaaaaaaaaaaaaggcggggggatttgcatggggagaatcctatggaggaccaataaaatctcagagaagtgagctcgacataaagcaaagaaaatagactcgctttcagaatttttgacatttttgcctttttagtaaattatcaacactttggaaattatgttttatttcaatatttttcttttctttgcaaaataggtatacacccaaactcacacaaacacaattacttactccgtaactcctttacttctaagatttatccttagaggaatatatttgtatattttatccttgtaaaacaagactatcagtctgcatatattttgcaagtcagaaaggtgacatgtgcaaaaaaaaaagtggaataaaattttgtaaatactcattcaatattcagaaatacatggctttaaattgtacttttatataatcttcattattaccattataatggccctgtagttacaaaaagaataaaaatattaccaatagaaacaatattctttaaactgtttgatgtttaaagttattgaaaaaagggatccctaaaaatgttattcaactatgttaaccaatagtgtattgttatcatctgttacctacaagcttcagttaggttggataggttaacactggtaaaaaaataatactttgttcaatgcacaatagtagaaacaaaaacaattatgcttaattaaaacaaattaagttcacacagaatctaaatttttttttaaatccactgtatcttattattttaataagcaattggaaaaacaacttgaattgaagatctaaaatgtttctcccttactataatgcatggaatcttactctaaaaacctaccccatgtatcacatgctgttgttaatcaaccacaaagcacttccccacttagaatctcttgatatgtcttacatttcagtgtctatgaaaaactatgtgaatgatgcttgtctaatagagatgtgcctcttataggtctgatgaagcaaaaactaaccatgtgcttttgtatacacactaagaatgaaggcataacaagtgatctaagagttgaattgcagccgggcatggtggctcacgcctgtaatcccagtattttgggaggctgaggcaggtggatcatgaggtcaggagttcaagaccagccttgccaagatggtgaaaccccatctctactaaaaactgcaaaaattagccaggcgcagtggaaggtgcctttaatcccagctacttgagaagctgaggcaggtgaatcgcctgaagctgggctgcagaggttgcagtgagccaagatcgtgccactgcactccagcctgggtgacagagtgaggctctgtctcaaaaaaataaaaaagagttgaattgcatcaatgtttgcttttcaagaattttaattttttaatgcaaaaagtatgctttgaatgtaattataactctccagaagaaaaatcaatctcctccttttaaatgtacatacaaataaattaattttttggtaattctttatagaaacaaagtcttgctgtgttacccaggctggtctcaatctcgtgggctcaagtgtttttttcaccctagcctcccaaagtgctgggattacagacatgagccatggcacctggccttcagcaattttctaagcttcccaatgacacagtatattgtaaaaatatacacggtagcctgggtgcggtggctcatgcctgtaatcccagcattttgggagcccaaggcaggcagatcacaaggtcaagagatcgagaccatcctggccaacatggtgaaaccacgtctctattagaaatacaaaaataagctgggtgtggtggtatgtgcctgtaatcccagctactcagaaggctgaggcaggtgaatcactcgaacctgggaggttgcagtgagccgagatcatgccactgcactccagcctggcaacagagtgatactccttttaaaatatatatatatacacatatataatatatacatgtgtacatatatataatatatacatgtgtacatatataatatatacatgtgtacatatatacaatatatacatgtgtacatatataatatatgtatatataatatatacatgtgtacatatatataatatatgtacatatattatatatgcaataaatacattaagctacattaccataagaaatttggtcatgtagtgtttaaattacctatctcaatttatattaaaaaaactgaaaatcggggccaggtgcagtggctcacgcctgtaatcccagcacttagggaggtcgaggtggattgatcacctaaggtcaggagttcaagaacagcctgaccatcatggtgaaacctcatctctactaaaaatacaaacttagctgggcgtggtggcaggtgcctataatgccagctacttgggaggctgaggcaggagaatcgcttgaacccgggaggcaggggttgtagtgagccaagatcatgccattgcactccaggctgggcaacaagagctaaactccatctcaaaaacaaaacaaaacaaaaaaaaacctgaaaattaaaaaaaaaaaatagattttcttacatttacagaggtacttagtgttctgataaagttactgagtacaaatatctctagaaacacatctgaaaccatcacagaatagaaagtcataaagtagaaaactcacatctttatctggtgttcttgcgattttgaaaccaaatttcaatatcactactgctttcacacatttcagcaatgatgtagaaaggatttaaaatagtttcatacagagtttctctaaaagacaaatagtctcatgtcccccaatagcaatggaagacctgtcagattattcaacctcttataaaccataagatggacttcagctctaagtataagcttgaaggaagattaaattaaagtagaattcttgggggatttaagaccatgggacagaagctgccccactgtttgggtatgagaaaagaaatcaggcattttagaaactatttctattgcagcagaccttcctaaaccacattttatggtctggctttcttcttcacctttggacctcagctgtgtcatcttctttcactcccgcctacctaggtgctggctatggtctcttgtctttctaaattccaagattctttcctttgcttcagagagttgatcaggcccagattagacacagcaagatctgtcttattagaaaaaggaaacatgagttttgctggattctccaattaccagactagtacttagtactgtgcttactaaagaaaaagaatattacagataatgtaaagttaatatcaaaataccttttcttcgacagaatctttagaatatttagaaagtattttaaatttgtgggtccttagctcactacccagtagtactactgaatcaaaagctggtggtgaaaattggattttaaaatatgagcaacattttatgctactaaatttctataattaccactaaactagagtgaagaatgtcaatcattcaagaaaaaaaggttaatctcaaaataaaacatattgggcggggcacggtggctcatgcctgtaatcccagcactttgggaggccaaggtgggtagatcatgaggtcaagggttcaagaccagccaagaccactgcactacttttttttttttttttgagacagttttgctcttgttgcccagattgaagtgcagtgccatgattttggctcactgcaacctctgcctcccaggttcaagcgattctcctgtcttagcctcctgagtagctgggattataggcatgtcccaccacgcctcgctaattttgtatttttagtagagatggggtttcaccatgttggtcaggctggtctcaaactcctgacgtcaggtgaaccacctgccacggcctcccaaagtgctgggattacaagcatgcaccaccgcgcccagccaaaaaaattctttttttatactaacaaattccccaaattttctagacagcagggatctaaaactattcattgaaagcaaaattatgtttaggaatatggagcatatttttatgtttgttggcttcttgtaagttttcttttgagaagtatcagtttatgtcttttgctcatctttgtggggttatttattcttctttaattaatttttttataggttctggaaattagacttgtcaaatgcatagtttgcaaacatttactctcattctgtaggttgtctgtttactctgttgatagtttcttttgctgtgcagaagctctttagaatagttaggaagttgggaaattgtcactttttgtttttcttgcttacttttggagacttagtcaaaaattctttgccaaggccaatgtcaaaaaagatatttagtaggtttttttgtaggatttttatagtttgatgtcttaaatttaaatccttaattcatcttgtgttaatttttgtatatggcaaattgtaggggttcagtattatctagtatttttttccgcatacggttagctggttatcccagcaccatttattaaatagacagtcttatttccattgcttatttttgtcaatgttgtcaaaaattatatggctgtaggtgtgtagctttatttctgagttttgtattctgttccactggtctctgtctgcttttataccagtaatatgcttctttggttcctgtagccatatagtatagtttaaatttgggtagagtgctgtctctggctttgctctttttgcttaagattgttttgggtatttatgctctttattgttttatataaattttagaatagttttttttttaattctctgaaaagttttattggcagtttgatagagatagcattgaatctgtagattaatttggccaatggggtcattttaatattgattcttttaatccatgtgaatataatgtacttccatttgtttatgtcatctatgatttctcttagcagtattttgtagttctctttgtgataattgttcacctcctgggttatatgcattcttaggtatttttttgtggcaagttaaatgggattgagttcttgatttggccctcagcttcaataatattggtgaataaaaatgacttttgcgtattgacttggtattctgaaacactactgaacttgctgataagttccaggagctctttagtaaagttattaggtgtttttaggtatcaaattagataatccatagaaagagatagtttgactttttttcccgtaatttggatgccttttatttcttgttcttgactgattgttctgacgagaactattattaatattttgtcattaaaagtgaataaaaattctatcactctcctgcttctacttcccttaactcttacattacagccaaaagaaatctttacatttctcattttattacaataaaaatatgtattttaccagaaaaataaaacaagaatatggttaaaaaaaacccaaaacatatatcaaatttaaaattttctacaataaaataaaatcgattgaaacatgtaaaataaaagaaagcagccaggtgcagtgactcacgcctgtaatcccagcactttaggaggccaaggtgggtggatcacgagatcaagagttcgagaccagcctggccaacatagggaaaccctgtctctactaaaaatacaaaaattagccaggcctggtggcacatgcctttaatcccagcaactcaggaggctgaggcaggagactcacttgaacccgggaggcagaggttgcagtgaggcgagatcatgcctccgcactccagcctcagtgaaagagtgagaccctgtctccaaaaaaaacaaaaacaaaaacaaacaaaacaaacaaaaaaacaaagtgcaggtgagtgcttcgaactgaacaccttagaagccctagtccattgtggatgcactgaagccaagattgtcaccaaaactcagttctctgttctccagagtccaggatctgtaaaactctgcatttaaaaaagctctcaatgtttttccaggggagactgtgttcatctatatcctatctcttctcaccttgattcaaatcctacctgatctagcggtgctgtttctggttttgagcttagttttctgtaattctctttcttatttggattgtggtctggtcctagtcagaaaggaagtttaggtgactcaaatctctctagatccagagtcccatagtctattcctgacttacatttgttgttcattttcttaactaaggctgttcagcaagcatcaagagttaatgagaagaatacggttccaagggatcattactacaattctcaaagccatctcagggatataagccatttctcattccctagctcaaaataaaaccctaccaaagacacacagcttactatccctcattccaccactctttctgatcttaatatgaacagcccaaggccttatctggcatttgagtgcattacctactggaatgggaagagagcaccttgtcttttttcaaatagtttctcctcctcatctaagcttctatctgtaaaaaagatttgttgaaaatggagctggcaagtggggccttggatgaagaggtagagaagatcttggtcttcagtttcccattccatgttgaaactcaaatgaaatgtcctctctcttacacatccagactcagaatgcagggtgttatgctggacttgccttttataagcccctcagctgggtacggctcactcttatgacaagaaatttatttcctggagacattatggccttcataaggaatgtttcaggttgtgatttactgggtaccttagacacacataaggggagattttttcagggtcctgtcatagcatcaaaaaccaaaataacaaaaccagccaggtgaggtggctcacacctgtaaccaaagcacttagggaggccaaggtgggtggatcacctgaggtcaggagttcgagaccagcctggccaacatggcgaaaccccatctctactaaacatacaaaaattagccaggtgtggtggcgagtgactgtaatctcagctactttggaggctgaggcaggagaatcgcatgaacccaggaggtggaggttgcagtgagccgagatcatgccattgcactgaagcctgggtgacaagagtgaaactctgcctcaaaagaaaaaaaaaaaaccagtaggcatgaaaattgaaagtcaagagactcatccccttttgatttctagccctcttttcacccagaactattaaaaaccttggccagattttaaaatgctaaattaaacagaccatatattaacaggtatatttaaattgtacacataaagaaaattacataaaggccaggcacggtggctcacacctgtaatctcagcactttatgaggttgaggcgggcggatcacttgaggccagaagttcaaggccagcctggccaacgtagtgaaaccccggctttactaaaaatacaaaaatgagctggatgtgggtgacatgtgcctgtaatcccagctactcgggaggcagaggtgagagaatcggttgaacccaggaggcagaggttgcagtgagccaagattgcaccattgcactccagcctgggtgacagagtgagactctgtctcaaaaaaaaaaaaaaaaaaagaaaaaaaaagaaaaaagaaaattacatataccattaaaattgtatacctatatgtcacaatttttcaaatgcttggaaatgacatatcaaattatagttgattgcatttgataaatatacaataaaataaaatgcagaacaaccaaactccaaatagaatatgcctttgtctcttgaatgttgaagagatacttaaatcaaatgtgatcacattgaattgatcagataggagccagtgctaactcaatcaaccactgattcctaaggcagcaaagagcccagctggagaagcaagcttctcctctacctcaccctccctcagtcatcctgggtgctacattgtcttctgtagaatttgctcagcattcactatctgagctgacaaatttggctagattattatcacaaccctaacacattttggttctttgttcttgtttctttgtttaaaataggttgtggatataactattacatcatgaaacttttttttttttttgagatggtgtctagctctgttagccagactggagtgcagtggcgtggtctgaactcactggaacctccacctcccaggttcaagcgattctcttgcctcagcctcctgagtagctgggattacaggcgcctgccaccacacccagctaattttttgtatttttagtatagatggggtttcgccatgttggccaggctggtctcaaacttctgacctcatgatccgcccgccttggcctcccaaagcactgggattacaggcatgagccaccacacgtagcctacatcatgaatctttagaaacccagtatggtacttgtctgggtctagtcctaaaaataataaacagatccaaaaaactgttgcaacattaacctttgaaagctgcctgtgatgatactgactcactgacctcctttctcctcaatccacagagaaagtgcaagaaccaccaggtcttagggcacatggccaggaccaggaggtacccagtgaagtgctctaatgtggtcctgtcccacagcccctgaaccaaataaggacaagcagaacctgaaaccaaggaaggcttgggaactgcagactccaggactctttactaagactaacaggaggaatgaaggcaaagatcagatacctgcagggttgaaaccgtacccagactttggaattttagtgtctccttctttactctgtgtccacagccctctttaagagtggagagagaaacataatagaaatacatgaagagtctgggtgcggtggctcacgcctgtaatcccagcactttgggaggccgaggggggcagatcatgatgtcaggaaatcgagaccatcctgactaacacggtgaaaccccatctctactgaaaaatacaaaaaaaaaaattagccaggcgtgcctatagttccagctgctcaggaggctgaggcaggagaatcgcttgaacctgggaggtggaggttgcagtgagctgagatcgtgccactacactccaacctggtgacagagcgagactctgtttcaaaaaaaaaaaatacatgaagagcccagcatactcctgagttcctctctcaggagctcattctattcctggaggatcattgtgagcaggtgtatgaggataccttgaaactgcatgtggcaggcacaattgcagtagattacaaatgaaagcccatcttgattggacatgaagaaaccatgcaaggatgcttggagttgggggctggatttgacatgaaggcagaagataccttcacaaagttcagaagaccttcattgctttcctcacagcaaaatatgagcgaggacagtgcccctgctgttccttccctgggtggtgacagaaagttgagacacatacaaacacttaacatagtttactcagcaagcaagaaaatcttggaaggaagattctactgcagaatttgtgcagcagatatgaactgaagcatcagcaaaactgaaaagtaatgagagaatctggtggctctgaggtgtttttttccctttgtttcctgcttagttgctctttgaggatcccctgacttgttttactcctgtgccctttatgaatgagtgatgatcatcttaaaaatcaggatgttcggccaggtgcgatggctcacgcctgtaatcccagcactttgggaggccgaggcgggtggatcacctgaggtcaggagttcgagcccagcctcaccaacatggtgaaactccatctgtactgaaaatacaaaaattagcctggcttggtggtgtgtgcctgtagtgcccactactcaggagcctgaggcaggataattgcttgaacccaggaggcagaggttgcagtgagccaggattgcaccactgcactccagcctgggtaacagagagagactctgtctccaaaaaaaaaaaaaagaaatcaggatggtaaaaaatatttttcatgtatgtgtaccttcctttttactcttcttcctcttcttcttcttcctcttcttcttcttcttctccttcttcttctccttctcctcctcctttttctcctcctcctcctccttctcctcctcctcctcctttttctcctcctcctcctcctcctcctcttctccttctcctgctgctgctgcttttttggattcttctgcttctgttttctttttctctttgctattatgtacatgcccaccaagaacatgctaggtatggggatttctgcacagatgttcaagtgttttatgagatgccttccaggaggtagaatcctttatgtaagatcatgtgtctttccacgcttgatacatattttaaaattatctttcaaaaggtaattggccatttatactccttacaagcatgcacaaaacagcaggtttcctctgataacatagagaccgtattaaggaacatttaaatttccaaactgatggtcacacaaactcatatattttgtaattattttttaaccaccattaaagttggatgcctctttatgtagacaatgacaatttttacttcttttactgtgaaatgttattataggtcccgtgtctttttgtaattaagtttgtaattttgctcttaatttttaggggtggctaacaccttttatttgaacaccatatctcccacatcattctagcagggtagtgcctatccacaaatcctgagaatagatttgttctgaatctgctgtcatgagttagcaagaagtcaataaacccagagtgtcatccatccgcctagcagggcctcttatcaagtcatgaactggtttctctcttaattcatgaacagctgaagaactgaaggtggatttattaattggccccatgctttacctaaccacttgggccaggactcaaccctctttgccaagctgactatcaacaggcttgaagtttgctctcataatgtaccctagtgtgccaccaagacacctgtcctggccactacaacttgtcttatggttgtcttggtataaatgcaaactcagattgcttgctgtcgagcatatatgtggccaggacagcaaatctagcattcaggaatgaggcaagaggccttcccagactcccaaatgaacttttcagaattttccaaaaatgctgagactcagtactttccagaccccactctccaaaagaatcatagatgggatctgggaaccattcagacactcaagcctcctctgcagtgaaaatgaacttggacctaaagaggcaaccctttgtccacaggtcaccaagaatgctgagcatcgatctcctccctccccatgggagaccttacctcagttccatcaaagcccatattgtttcccaacctccacaatccagacatgttctagagtaaactctcagaattgtcttgagatgggacaagggctggtggagctccaggttcagaatggcggcatcattttccctcctgagaagtttgcacctgctgatcagagcccttacctcttagggggcttagcccatgtccaaggaagtaccccctaactggatctcccagtctcttcctcctctaaggagagtgcccatgagaccctctatgctagggaatacatgacctccattcttacgtaacttggttgactgataaacggataccctgagaaacaagaagatgcagggaacatcttggttctggttaatctgtgctccttagctgaggtgcctgtgcaaatgctggaacccaaaataatattgggtggtagacacacagacactgcctaataaaattatgtaagtttatgtttaacataaatagaatttataatgttatataaaaatgttgctacttaattttataagaaaattcagtcagatttttataaaggcattacaatctaattttaatgagaagctatgaaaattatgtacacttggtgtgtaaatgactgagttttgggtaattctgcaaaggccaactatgaatgtgagtcattgttaaccaaatgctcttacagataccatattgcacacctgttttaatttgttcttttacctgaggtcaatttttcataattttaattatcaaattttatacactttagataaaagaaacctttgcagttaccatgtactctgttggtctgtagtttgttagaaatacaaaatttcagacaagatacaggtatgttgtatcaaaacctggattttatgtatttccaggtgattcacatgcacattaatggttgttatgttggagtaattctattcttaaaaggggaaataattatatgggtgtactggtttgtctaaaaggtataactaagatggtacgtttcagtgcctatacatcctatctcacacacacacacacaaaaactgagaaaaaagtggaaatggggaatagattgaagtagagattaaacaaaaatgacacataggccaggtgcagtggctcatgcctgtaatcccagcactttgggaggccgaggcaggcagataacctgaggtcaggagttctagaccagcctgaccaacatggtgaaatcctatctttactaaaaatataaaaattaggccaggcgtggtggctcacacctgtaatcctagcactttgggaggctgaggcgggcagatcatgaggtcaggagatcgagaccatcctggctaacatggtgaaaccctgtctctactaaaaatacaaaaaattagccgggtatggtggcatgcacctatagtctcagctactcaggaggctaaggcagcagaattgcttgaacctgggagatggaggttgcagtaagccgagatcatggcactgcactccagcctgggtgacagtgagactctgtctcaaagaaacaaaacaaaacaagacaaagattaaccaggcatgatggcacgctcctgtaatgccagctactcaggaggctgagacaggagaattgcttgaacccaggaggcggaggttacagtgagccaagattgtgccattgcactccagcctggttgacagtgagactctgtttcaaaaaaaaaaaaaaaagacacacaattagcagatattgaagttgagcatcagtctattatgctattatggttattgtgtaaatgtttaaagtattctgaataaaacacatgtatgaagagataaagttgatctacaacattagctcttaagattgtggttcctggctaagcacaatggctcacacctttaatcccaacactttgggaggtcaaggtgagcagatcacttgaggtcaggagctcgaaaccagcctgggcaacttggtgaaaccctgtctctactaaaaacacaaaaattagccaggcatggtggttcacacttgtaatcccagctactcggaaggctgaagcatgagaattgcttgaacctagaaggtggaggtttcagtgagccaagatcatgccactgcactccaacctgggcaacagagcaagactctataaaaaaaaaattttagggagtggacaagatggccaaatagaaacagctttagtctgcagctgccaacaagagaccaatgcagaaggcaggtgatttctgcatttccaactgaggtacccagttcatctcattgtgactgcttaggcagtgggtacaacccacagagagtgagcagaagcagggtggggcgtcactttgcctgggaagtgcaagggactgggatccttcctccctacccacagctaagggaagccatgaggaactgtgctgcccagctgggttactatgcttttcccacagtttttgcaatctgcagatcaggagatttcctcctatgcctgcacaactagggccctgggtttcaagcacaaaactgggtggctgtttgggcagacactgagctagctgcaggagtttttttttcataccccagaggcacctggaaccccagcgagacagaaccgttcactcaccctggaaagggggttgaagcccgggagccaagtggtctctctcagcaggtctcactcccacagagctaagcaagctgagaaccactggcttgaaattctcagtgctagcacagcagtatgaagttgacctgggcgattgagcttgggaagggcatccacccccattactgaggctttagtaggagattttcccctgaaattgctaaggaggctgaaaggtctgggctggatgtggcaaaatagctgtggtcagactgcttctctaaattcctcctcactgggcagggcatctccgaaggaaaggtaacagccccagtcaggggcttacagacaaaacccccatctccctgggaaagagcacctgggggaaggggcagctgtgggcacagcttcagctgatttaattgttcctgcctgctggctccgaagagagcagctgatcctgacaagagggattctgccagcacagcacaccagctctgctaagggacagactgcctcctcaagtgagtccttgacccctgagcctcctgactgagagaaatctcctaacagggttcaacagagacctcataaaggagagctctagctggcatcaggccagtgcccctctgggatgaagcttccagaggaaggagcaggcagcagtctttgctgttttgcagcctccactggtgatacccaggtgaacagggtctgaagtggacctccagcaaactgcagcagacctgcagaagaggggcatgactgttagaagaaaagctaacaaacagaaagccacaacatcaacaaaaacataaaggacccccacacaaaaaccccatccaaacctcatcagcctcaaagatcaaaggtagataaatccatgaagatgagtaaaaaccagtataaaaacactaaaaattccaaaaaccagaatgcctcttctccacaactcctctccagcaagggcacaaaagtggctggagaatcagactgatgaattgacagaagtaggcttcagaaggtggataataacaaactcctctgagctaacagagtatattctaacccaatgcaaggaagttaagaaccttgataaaaggttacaggaactgctaactagaataaacagtttagagaggaacttaaatggccagatggggctgaaaaacacagcacaaacacaagaacttcatgaagcatacacaagtgtcaatagctgaatcaatcaaacagaagaaaggatatcaaagattgaagatcaacttactgaactaaggcatgaagacaagcttagagaaaaaagaatgaaaaggaatgaacaaaccctccaggaaatatagcactacatgaaaagaccaaacctgtgattggttggtgtatctgaaagtggcagggagaatggaaccaagttggaaaacacatttcaggatattacccaggagaacttccccaacctagcaagacagaccaacattcaaattgaggaaatacagagaacattgctaagatactcctcaagaagagcaaccccaagacacataatcgtcagattctccaaggttgaaatgaaggacaaaatgttaagggcagccagacagaaaggtcaggttaaatacaaaggtaagcccatcagactaacagcagatttctctgtgaaaatcctacaagccagaagagagtacgggccaatattcaacattcttgaagaaaagaattttcaacccagaatttcatatccagccaaagtaagcttcataagcgaatgagaaagaaaatcctttacagacaagcaaatgctgagggatttcatcaccaccatgcctgccttacaagagctcctgaaggaagcactaaatatggaaaggaaaaactggtaccagccactgtaaaaacacaccaaaatataaagaccaatgacactatgaagaaactgcatcaactaacatgaaaaataaccagctagcatcatgatgacaggatcaaattcacacataacaatattaaccttaaatttaaatgggctaaatgccccaatttaaagacatagactggctaactggataaagagtcaagacctatcagtgtgctgtattcaggagacctatctcacatgcaaagacacatataggctcaaaataaaggtatgcaggaatatttaccaaacaaatgaaaagaaaaaaaaaagctggggttgcaatcctagtctctgataaaatagactttaaaccaaaaaagatcaaaaaataaaaagaagggcattacataatggtaaagggatcaatgcaacaagaagaattaactatcctaaacatataagcacccaatacacgagtgcccagattcataaaacaagttcttagagatctacaaagagacttagactcccacacaataatagtgggagactttaacacccctctgttaatattagacagatcaaggagacagaaaattaataaggatattcaggacttgaactcagctctggaccaagcagacctaatggacatctacagtactctccacaccaaatcaacagaatataaattcttctcagtgccacacagcacgtattctaaaattgaccacataattggaagtaaaacgttcctcagcaaatgcaaaagaatgaaaatcataccaaacagtctctcagaccacaggacaatcaaattagaactcaggattaagaaacgcattcaaaacctcacaactacatggaaattgaacaacctgctcctgaatgactactgggtaaataacgaaatgaaggcagaagtaaataagttctttgaaaccaatgagaacaaagacacagtgtatcagaatctctgggaccagaatctaacacagctaaagcagtgttaagaggtaaatttatagcactaaatacccacaacagaaagctggaaagatctaaaatcaacaccctaaaatcacaattaaaagaactagagaagcaagagcaaacaaattcaaaagcgaacagaatacaagaaataactaataccagagcagaactgaaggagatagagacacaaaaaaccttcaaataatcaattaatctaggaactggttttttgaaaagattaacaaaatagatagactactagctagactagtatagaagaaaagagacaagaatcaaataggcacaataaaaaatgataaaggggctattaccactgatcccacagaaatacaaactactataagagaatactataaacatctctatgcaaataaacttgaaaatttagaagaaatgaataaattcctggacacatacaccctcccaagactaaaccaggaagaagatgaatccctgaataaaccaatagcaagttctgaaactgaggcagtaattaacaggctaccaaccaaaaaatgcccaggcccagatggattcacagctgaattctaccagaggtacaaagaggagctagtaccattccttctgaaatgatttcaaacaatagcaaaagagggactcctccctaactcattttatgaggctagcatcatcctgataccaaaacctggcagagacacaataaaaaaaaaaatttcaggccaatatccctgatgaacatcaatgcgaaaatcctcaataaaatactggcaaaccaaatccagcagcacatcaaaaagcttatccaccatgatcaggtgggcttcatccctgagatgcaaggctggttcaacatacacaaatcaaccaacataatccatcacataaacagaaccaatgacaaaaaccacatgattatctcaatagatggagaaagggcctttgataaacttcaacatcccttcatgctaaaaactcttaaaaaactaggtatggatggaacacacctcaaaataataagagctattgatgacaaacccatagccaatatcatactgaatgaacaatagctggaagctttccctttgaaaaccggcacaagacaaggatgccctctctcaccactcctactcaacatcatattgtaagttctggccagggcaatcaggcaagagaaaggaataatgtgtattcaaataggaagacaggaagtcaaattgtctctgtttgcaaatgacatgattgtatatttagaaaaccccatcatctcagcccaaaaactccttaagctgataagcaactttagtaaagtctcaggatacaaaatcaatgtgcaaaaatcacaagcataggcctggcatggtggctcgtgcctgtaatcccagcactttgggaggctgaggtgggcagatcatggggtcaagagatcgagaccatcctggccaacatggtgaaatgccgtctctactaaaaatacaaaaattagccaggcatgatggtgtgtgcctgtaatcccagctactcatgaggctgaggcaggagaatcgcttgaacccaggaggcggaggttgcagtgagccaaggttgcaccgctggactccagcctgggtgacagagcaagactccgtctcaaaaacaaaaagaaacaaaaaaaacacacaagcattcctaaacaacaacaatagacaagcggagagccaaatcatgactgaaatctcattcacaattgctacaaagagaataaaatatctaggaaaacaacttacaaggcatttgaaggacctcttcaaggagaactacagaccactgctcaaggaaatgagaggacacaaacaaatggaaaaacattacatactcatggataggaagaatcaatatcatgaaaatggccatattgaccaaagtaatttacagattcaatgctattcccatcaagctaccagtgactttctttgcagagttagaaaaaactactttaaattttgtatagaaccaaaaaagagcccgtatagccaagacaatcctcaagatgaattgaagacttaaatgtaaaaccccaaatcataaaaatcctaaaagaaaacctaggcaataccattcaggacataggcatgggtaaagacttcatgactaaaacactgaaagcgattgcaacaaaagctaaaattgacaaatgggatctaattaaactaaagagcttctgcatagcaaaagaaattaccatcggagtgaaaaggcaacctatagaatgggagaaaagttttgcaagctacccatctgacagaggtctaatatccaaaatctacaaggaacttaaacaaatcatttatgtggccaacaaacatatgaaaaaaagctcatcaggcccagagcagtggctcacgcccgtaatcccagcactttgggagaccaaggtgggtagatcacgaggtcaggagttcaataccagcctagtcaagatggtgaaaccctgtctctactaaaaaatataaaaattagccaggcacagtggcaggcacctgtaatcccagctacttgggaggctgaggcaggagaattgcttgaacccgggaggtggagtttgcagccagctgagattgcaccactgcactctagcctgggcgacagagaaggactctaactcaaaaaaaaagaaaaaaagaaaaaaagctcatcatcactagtcattagagaatgcaaatcaaaaccacaatgagataccatctcacaccagttagaatggagatcattagcaagtcaggaaacaacagatgctggaggggatgtggagaaatagaaatccttttacactgttggtgggagaataaattagttcagccattgtggaagacagtgtggcaattcctcaaggatctagaactagaaataccatctgacccagcaatctcattactgggtatatacccaaaggattataaatcattccactataaagacacatgcacacatatgtttactgtggcactgttcacaatagcaaagactcggaaccaactcaaatgcccatcaatgatagactggataaagaaaatgtggcacatatacaccatggaataccatgcagccataaaaaatgagttcatgtcctttgcagggacatggatgaagctggaagacatcattgtcagcaaactaacacagaaacagaaaaccaaacactgcatgttctcactcataagtgggagctgaacaatgagaacacatagacacagggaggggaacatcacacattgaggcctgtctgagggggcaaggggagggagagcattaggacaaatacctaatgcatgtggggcttaaaacccagatgaccagttgataggtgcagcaaactaccgtgtcacatgtatacctatgtaacaaacctgcatgttctgcacatgtatcccagagcttaaagtaaaattttaaaaataataaaaattaaattaacaaaaaaagattgtgattacctttagggaggagaaggaaaagaggctgaaaatggtggttgggggcataaacaaggctaattctattctatggttaaacaaatgtgtttgccttacaatgatttattaagctttatattaatgctttgtgcatgtatttctgtatgtatgctatacattaataaaaatttaaatattacatatttaatcctaacaatatttcagaattacagtaatgtttggtattattttgttttaaagtggggcattttcatgcaggtgttctgagatggatattaatattccaaggtatatctttatgttctgtctcttgggagacccataaggttttccaatttctacctcaattaagtagcactgttttaatttggaggatgcaattttttacagcaaagtcttctccccacgatagtactcaccaaggccaggccgcctagcacagtgccctgcacgcagtgtgcacccagtctgtacagaactggtttgaatcaggaacaaaacaagtagcagaggtcagttctacaaatgatagaaagtaggtacacaatgaagactgaaaggctacactcaacagcaaacacttttgcatttatttggaaaatattttaaactagctcaccaaatgatgttcatgtcaagcagtgatttgggagtttggctgtgactgtaacctcctggagagctttaaatcacattgtctcctgggtctcactccaggattttggctaattgtgccattgcaacttgagtttggggactttaaacatcccaccttcaggttgctctaatatccaggcaggggtaagaagcatttattcagggtgaagaatgcattgcttgtgtgtgatttttatgtgtgcttcaggctttgccccatagctgctcctaaatttgtgggcttagaaaacatctttgcccttcaaagtatacacagctgtttggctaaattgcagcaggagaaaatatcagcagctctatctatgtcacttacctttcgagtaagaggttgtttcaggcacagtaatttgatttcttctgtgttgaaaattataaatagcctagaactaccagaaagagatacaaagattttgcagatgtgtggagtgcattataggtgttttcaaatttctcttataatgagaaataaaaaacataatattaggccttaatttactaaactcagtgttcagccattttctcaaatggtttatagtttttccaagagacttcagcagcattctctagagggaatgaattcccccaagagtgctaactggatgggatgagaataaaacataatcttgcttctatttcagaagtgtccctctacagagccttttttttttttttaggcggagtctctctctgttgcccaggctggagtgcagtggcatgatctcggctcactgcaatgtccgcctcccgggttcacgccattctcctgtctcagcctcccgaggagctgggactacaggcacccgccaccaggcccggctaattttttgtgtttttagtagagacggggtttcaccgtgttagccaggacggtctcgatctcctgaccttgtgatccacccacctcggcctcccaaagtgctgggattacaggcgtgagccacgcgcccagcctccagagtcttgatggactagaaaacgtggctgagtagtgtggtctgtggaagtgcatgagctctggactcagatagagttaatccttaatcccagcccagctgcttagtagctgtgggacagttaaataaaccttatctgcaaataaaagcataataggccgggcgcagtggcttacgcctgtaatcccagcactttgggaggcagaagcgggcaaatcacgaggtcaggagatcgagaccatcctggctaacagggtgaaaccccatctctactaaaaaaatacaaaaaaattagccgggcgtggtagcgggcacctttagtcccagctattgcggagcctgaggcaggagaatggcatgaacgcgggaggtggagcttgcagtgagccgagatcgcgccactgcactccagcctgagcgacagtgagactccgtctccaaaaaaaaaaaaaaaaaaaaaaagcataataaaattgattgaaaaaaacaattatttttattcattctcatatccatgcccttagcatatgattttataatagttcccatcaagagacaggatctgttttctaaatcttggatctttctggccttatttgcacaggccaaaactgaaatgacagcatgtcagttttgagcctaggctcaaaacgtcttaaatgtttctaaaatgggtcttaaaagctcatttttgcttgctgaaaaataaaagtatcacaaggagaaaaattgaagtgccccagttgacaggtagctcactctcagaagcagaaccacccaatctgccagcagctgaccactcatgcctgaagcccagcctaaatttctaaccagttcaatgatgagctagtaagttttaggatagtttgttatgcagttataccttactaacataaacattcattatagacagggtatcaggattccaaaaagattcattgcaaataacctgcaaatggtctgcaccttataagtactgattttcttttccatttatttaaagttagatttctgttaggtggtattgaattatacagaagagcaagtagatgtatataattggtgcttaaactcacacagtgccccataccacaggagaaaaacatacagctacagccagacaattaggtccgaggccaaatagcaaaataaggagttgacctttgtattaatttattttcacactgctataaagacatacctgaggccaggcacggtggctcatgcctgtaatcccagcactttgggaggctgaggcaggtggatcacaaggtcaggagatcgagactgtcctggctaacacggtgaaaccccgtctctactaaaaacacaaaaaattagctggttgtagtggcaggcacctgtaatcccagttactcgggaggctgaggcagaagaattgcttgaacatgggaggcggaggttgcagtgagcacagatcgcgtcactgcactccagcctgggcgacaagagtgagactctgtcaaaaaaaaccccaaaaaacaaacaaacaaacaaaaaaactacctgaaacagagtagtttatgaagagaagagatttaattgactcaaaattctgcatggctggggaggcctcaggaaacgtacaatcgtggcagaaggcaaaagggaagaaaggcatgtcttcaacaggtggcaggagagagtgaaagagagagaaagcactatagacttatcaaacaaccagatctcctgagaactctatcagagagcagcaagaggaagtctgcccccacgactcaatcacctcccacaaggcccctccccgacatgtggggattacaactcaagatgagatttgggttgggacaaagagccaaaccatatcagcctttaatctattccctccacatctgaactttggaggtcaacactgtgaagagatgtgaagacatggggtttcctccttctgaggccctatcatccattgtttactgtctgatatttggaagagaaatcccctccaaacagcaactgggacacagtggtctacatgtggacacttcctgcttgcagctgctgctctgtctaagggcactgtgcctcccacccttgggcctgaacagagaagtttataggcagaggctgttctctcacttccagcagaaaaaggatattcaggtcctttacctctttgaggtcagagagtcacagtcttcagagatgcacttcaatgtgccagctacttgccatttgaggctactgggtacctggaatgtggctgatttaaaatgagatgtgctgcagatatgaaatagagtcagttaagaaaatttagaaccaaaaatcactctattaataattacatactgggctaggcacggtggctcacgcctgtaatcccagcactttgggaggccgaggcgggtggatcataaggtcaggatatcgagaccatcctgccaacatggtgaaatgcgtctctactaaaaatacaaaaaattagttgggcgtggtggtgggtgcctgtagtcccagctactcgggaggctgagggagaagaatggcgtgaacccaggaggcggagcttgccatgagccaagattgtgccactgcactccagcctgggcgacagagtgagactccatctcaaaataataataataattattattatcattattatatattgggctgggtgaggttgctcacacctgtaatcccagcactttgagaggccgagatgggtggatcactgaggccaggagttcaagaccagcctggccaacatggcaaaaccctgtctctactaaaaatacaaaattagctgggtgtggtggcccacatctgtaatcccagctacttgggaggctgaggcagaagaagtgattgaacccaggaggcagaggttgcagtgagctgagatcacgccattgcactctagcctgggcaacaagagcaaaactctgtctcaaaaaaaagatgatgataataataattattatatgttgatcacacatttattcccagtgttccattattggaacactaagcatatgggagttatttatatctcactgctcaaggtcattgccaacgtctgactgcaaaaattttaaaaattgcaacctcaggcataaatgggttaaaataataatattttggatgtactgggttaaaaaataatttcacttgtttctttttattatgtttaatgtggctactaaaatatttaaaattcacacacggctgacattttatgttttagaggattgcttttcttttaaaatctcaggttgcctactcagaagatcaggggccggaagtgttatgaaatattaaatattaaaataattgccattatagtgtttccatttgtaaacaacatatatgtgtgtgtataaaatttataagtggacctaaccttatacacaagattaaaaaattacccccaggcagagctaagcccagctcagaggtaaagcccttgctggagatgactggagccaagagtctgtcactcttgcctcattcagtgcactgtctggtagcatcttctgtcactcaaggcccgagggcgcggggccgggagctctatccaatcagggtgctgggatggaaactgtccaatcagattcacagccagagaggaaggggcggctcccggtatctggcggggcctttgtctttcgctccaggtagagcttggggttagtacatcactggcctgcgtgctccgctccaggaggtctcggtgattctgccacagcctcatcctccgtcgccctgtgacctactggtattggaacattcatagctaagactccaggacacccacaaagccgagaaatgctgagtttgcgggtcagggcgtccggagactggggaggcctcatcggagtcggccggaaatggcggtggcgggaccgagtctgtgagcctgagcccccctcagctcagccctcagtctcctctggtgcagggtacccaggcgtcctgtaccgtttcagcacagcggctttggccccagcctgtagccctctttgcgcagctctgcgcccgcatcttccccagcttgtgaggtgatgaggagaggttcaccagggaaagacgccgacttggtgtgcagggcttctgcgtggaaggagctctggtctgtggggtcaccagtccctactttaacctattcagacataaacggaggcaccattaaaacattaaagaatttatatgagcaaacagtgatgaaccagtgggacagccccagacatggtttgtcgtttgggggctaccagcgggtcttgaagaaaaggctttaaggtttgtgaagaggcaaagcaaactaaataattgattgggtacagttatgtagtcgtttcatttagagtgtccaggagaaaattttctggttatgtaatcagattaattggagatttatggttggttaagcctgaattttgttttctcctaaggtagtaacttacgagatacgcatttgagttagatcgttttgttgctgttacacaggaacctagatccctagagccacttcagtctacctgctatttaattattttaactttaatcagaagcactgtttttttcctacattttccaaatgtgtggcaagcagagtcttaaatctgttctgccagcctaacttggcttgcagtaaaatcttaaatttccagtttcttttttttttttttttttgtttgtgacggagtctcactctattggccaggctgcaacctccgtctcccaggctcaaggaattctcctgcctcagcctcccaagtagccgggattaccggcatgtgccaccacacccggctaatttttgtatttttagtagagacggggtttcaccgtgttagccaggctgctctccaactcctgacctcaggtgatccgcccgccttggcctcccaaagtgctgggattacaggcgtgagccactgcaccaggactgaaatttccagtttcttttcaacattcaccaaagccaactactcccatccaattcacaacattatcaactatttttgttttttattgtatgtttctatttgtaaatatttcaccggaggaaagcagaaaataatcccattacactccactgtcaaaaatttttctgctttttcttcttttatcttccctaggcacaaatgccttatcaggatatctttaaattcaagtttccctttggaaacttgatgggacagtgtgtcctcagccacactgcttttttttaagtcttgagttttagagctctcttgggataacccaagatacacacaacagccataccttttggaaggtttggtgaatatcagccccttggtcatctccttccagaggacacactgatgtatggaaatggagcttctcaggagagcagctgaatgtcctgaggctgagagaaatatcctggtttacccttcccataaaaagaacctttggggatcttaagattttctttccccagccccagttcttcctggtcagccaattggatggttgtatttaggggaaaagacaaaaataatgcctgtcttctgaattatctcatatttgtgaaggggggagaactgttttaaaagacaaaaaaaacaaacaaacaacaacaacaaaaaaaactcaccctaaggaggcatgcaagaacttgcaaagcaaaaaaaaaaaaaaaaaaaaacaccagggacacactgtagggcactgtgcagtgtcttctgggagggagagctttgagcactttagtgagtagggtaagggtggcagaatgtaccaacttataggattgcctgatttgacacttgagtcagatatgtgtctcttctggccgggcacggtggctcatgcctgtaatcccagcagctggggaggccaaggtgggtggatcatgaggccaggagatcgagaccatcctggcgaacgtggtgaaaccccatctctactaagaatacaaaaaaaagtagctgggcatggtggcacgtgcctgtagtcccagctacttgggaggctgaggcaggagaattgcttgaaccagggagtaggaggttgcagtgagctgagcttgcaccagtgcactccagcctgggccacaaagcgagactccatctcaagaataagggaagagaccagccctcatattgtcttatgcccaatttctgcctccaaagaaagaagaactaaaaactaaaaggcagaaatgaaatccacaggcagacagcccagtgccacaccctgagcctggtagttaaagattgacccctgacctaatcggttatgttatctatagattacagacattgtatggaaaagtactgtgaaaatccctgtcctgttctgttccattctaattactagtgcatgcagcccccagtcatgtaccccctgctttctcaattgatcacaaccctctcatgcggacccccttagagttgcaagcccttaagagggacaggaattgctcactcggggagctcagtttttggagacgtgaatctgccagtgctcccagctgaataaagcccttccttaacttggtgtctgagggatttttgtctgcagctagtcctgctacatttcttggttccctgactgggaatgaggtgattaatggatggatggttgatgcacctccttaggcagctgaggcttgccctgtggagcatccctgcgggggactctggccagcttgagcaacatggatcctgagagcgctcccagataggcatttgccctggtggaatgccttgttagagcggtgcacagcaggcccctgcggaggatcaacgcagtggctgaacaccaggaaggaactggcacttggagtccagacatctgaaacttggtaagactggtctttggaacttgcccactccatttgagtggaagcatggcctgatcacccacgacgtgcctgtaccggcactttggtttttgtttttgacttgacttggattgctcgatactttggttttggttttgacctggcttggatttcttgatactctgatttttgttttggttctgatttggtgtaaactgtgaaagtgtgtgtgtgccctttttacccgttctttgttttgtggtgtgcgtgtggtgtgagcgtggtgttttgtcttgaggaagcatgggtcaagcacaaagtaagcccaccccaccaggaactatgttgaaaatttcaagatttaagggagactatggagtactatgacaccaggaaaacttaaaactttgtgtaagatagactgaacagcattagaggtgggttggccaccagaaggaagcctggacaggtcccttgtttcaaaggtatggcacaaggtaacctgtaatccagggcacactgaccagttcctgtatatagacacttggttacagctggttttagactgccccccacagtggttgagagaacagcagcataagcggctggcagaggcaaggaaagaccagcagagagagagaggaagagacagacaaagagggagtcaagaagagagagagagagagacagaaagtgaaagagagaaagaaagagggaaatatacaagtagttaagaaaaaaaaagtgtaccctattcttttaaaagccagcgtaaatttaaaacctgtaattgataattggaggtcttttccgtgaccctacaacactccaatacaaccttgttgtaagtgtaagcaagggtgaagcccaaaagcactgaggccactgacaacctgtagccttcgtatcaaaaattcttaactgagtaatctgtggatggcccaaatgcattcaatctgtagcagcaactgctttgttaacagaagaaagtagaaaaataacttttagaggaaacctcattgtgagcacacctcaccagttcagaaatatcctaagggaaaaaaaaaaaaagatgatttaacattagccactgaaaattcccttaacctagcaggtttcctaacagggggtctaaatcttaattaccatacaaaggtctgaccagacctaggaggaactccctttaggatgggatgatagaaggaaaaaaaagaagccatctataccaattctaagttaatttggactaaacaaggtcttattaatagcaaaggataattgaaatccaaaacttacaaggttttcaacaaaagtaaagtttgctaaaagttaacagtgtaacatgtattatagtaacttctaatcttgtggccttagacagtctagtccacagacataaaggaagttcactttggaaaagaatggttatcatctttgggaaaaaaaggggaaagaaggtgagggagcagaatttatgtaaaaagaatgttatatggtaaattcttgtcctgaaataaattaactggttgtttaaagaaagaaatgtttgtaataagtcagaaagttgaggcctgtagaagaattgtctgtgaaagtcgtgaaagaaaaaaagttataaaaaaaaatttatgcaagaaatgttgtataatttaaaagtaactaggcctcctgaatgtaaaactattgaaaaaaacagtttatatgcaaggtgtataaacaaagtaaaatataactttggtaaaaggattataaggaggcataagaatgtaaatttttacctacattaaaaggttaaaaaaaattgttttgaaggtttaagcaagttttaaaacattaattttaaagaaaattctgtgtgtaaacatattagctaaagttaaaggggtatcatccagttgttctgtgaactggacgttaaagtaaaaacacaatgagtttttcttaaagcgctaacatgctcttttacaaagattataaaaggttaaaaacagtctataaaaatcttaccttggccgggcgcggtggctcacgcctgtaatcccagcactttgggaggccgaggcgggcggatcacgaggtcaggagatcgagaccatcccggctaaaacggtgaaaccccgtctctactaaaaatacaaaaaattagccgggcgtagttgcgggcgcctgtagtcccagctacttgggaggctgaggcaggagaatggcgtgaacccgggaggcggagcttgcagtgagccgagatcccgccactgcactccagcctgggcgacagagcgagactccgtctcaaaaaaaaaaaaaaaaaaaaaaaaatcttaccttatgatccaacattaaaaattgaataaatgtgtctataaagttttattaaaactaagtttaacattaatagcacactaatataaaggtgaaatttagcttatctggtataaaaatcatacaggaagcattgtcaaatataaaatggtatttggcttctttgatctaaaaactaataaaaaatacatgctaaaggaaatttctcagtagaaaggcaccaaggactacaaagtccactgctgatgtctccacatttaaaacaaaaggtcagtttcttagaaattatatacttggtttatcttccgctttcctttccatcaaaactaaaagtcttttagcacatgtaccacccctagaatttccagtaaaccagcaccagcctgaagatcacgttctcatcaaagggtgaaaagaaaggaaacttgagccagcctaggaaggaccctaccttgtgctgctaaccactgagactgctgttcatgcagcgaaaaaaggatggactcatcacaactgagtcaagaaagcgccaccccctccagagtcatgggccatagtccaagaggaaaaccctaccaaactaaagctaagaaaaatttaactctctcatctattctattactctttcttctttcctcgctctattgctgaccatctagttattaatgtagccaagtcaatttcacctcaaactattgcatttaatgcatgccttgttataccctgtggggacttgccaagtcaaagacttgtacttcagaaagctctgtacttcagaaaagtacctctgtccctcctgactctcctcagactgggcattagtaaattaggaccgtttaatccggggaaatttcgataaagcctccagtgtcaaccaggagccttgctccccaatgtagagcttttatgccatagttggtccaacattctgtggaccactaaagagcaaggatggactgccccaactggtttttgtaattccctaaaatcatacattaattttactagaggatcatagaagttaaagacttaaaacaaactttggcaaacaggatacgaagatgcaaattcctggttggaatggatcaaatattccatccacacgttaaacaaaagcaattgttatgcttgggcacatggcaggccagaggcccagattgtcccctttccactaaggtggtcctcctgtccaccaggcatgggctgcatggtagctcttttccaggattctacagcctggagtaataagttgtaccaagctctctctgtgatatcccaaagtccagcaccctgtgagtcagcccctgagggccatccagcttctgtctcccaacactaagttcacttcatgtctctcatgacagggaggaaacttagcattccttggagacctgaagggatgcagtgagcttaagaattttcaagagcttatcaatcagtcagcccttgttcatccctgagcagatgtgtggtggtattgtggtggacctttactgggcactgtgccgaataactggagtggcacttgtactttagtccaattggctatccctttcaccctggcatttcatcaaccagagggaggaaaaataagacatcgtaaagtaagagaagccccttatgggtctttcgactctcacgtctatttagacacaattggagtcccacggggaataccagatcaatttaaagcttgaaatcaaatagctgcaggatttgagtcaatattttggtgggtgacagttaataaaaatgtagattggataaactacatctattacaaccaacagcaacgagcttttcgtgagttaaaagaaaagctcatggcggccccagccctggggctacctgacctcacaatagttttacattcaggaggactaattacttttaaatttatacaacaatttcttgcataaattctttttttataattttttttttttttacacaatatgtgtcagaaaaaaaaatgatagttaatagttttaacccagactgtgggacactggccaaagctggtggcctatctctctaaacaattagacagggtttctaagtgttggccctcatgtttgagggccttggcagcaacagccctgctagcacaacaagcagataagctaactcttgggcaaaacctgaatataaaggcccccccatgctgtggtaaatttgatgaataccaaaggacatcattggctaacaaatgctagattaacaagtaccaaatcttgctatgtgaaaatccccccataaccattgaagtttgcaacaccctaaaccctgccaccttgctcccggtatcagagagcccagttaaaacataactgtcttaatccttttaaatggatcaaacccctcggaggatcattgttgtcactggcattattaatattggtatgtttatgttgtctacttttagtctgcacatgtctccaaggagtctgaggacaagtgcaaagtcaacaacaagcaatgatggtggtggtgatcctagtcaataaaaagggggaagatgtgggtggcaagccacccaggtgccaaagcaagagactgagggcacaagctattccagtataataaagaaaatatatagtataagaatagttctactagaaatagattatggatatgattatatatgaatgtcattaatcattagtttgtagcattattctttattctaatattataataatctttgttctacaattataacctaggaaaaaccaggccctacagagataggaggtgaagggacatggtgagaagtgaccagaagtcaagaatgttagccctctgttacgcccagacagggccactagtgggctccctggtctagcagtaatgccagcacccattacctagcagaccttggtctagcagtagcatcagtgcctagggaaggcacccattacttagcagaccaggaaagggagtctccctttccccgggggagttagagaagactctgctccaccacctcttgtggaaggcctgacatcagtcaggcccgcctgcagccatctggaggcctaaccgtctccctgtgatgctgtgcttcaatagtcacgctcctggtccactttcatgttccactctgtatacctggctctgccttctagatagcagtagcagaattagtgaaagtactaaaagtctttgaaatgcataaaagaaatagtggtgtaatctgtcctctctctctctccacctcggctgccaaacagggaagggccccctgtccagtggacacgtgactcgtgtgaccttacctatcattggagatggctcacactccttaccctgcccccttgtcttgtatccaacaaataacagcatggccaggcattcagggccactaccagtctccacaccttggtggtagtggtcctccgggcccagctgtcttttcttctatctctgtcttgtgtctttatttctatgatctctcatctccgcacatgaggagaaaaaacccacagaccctgtagggctgggccctacataactgtgtagaggtattagactcagtttattctagtgggcccaacctccgagaccatcttgagtatcaggagactgtgagctatacttggatgggagcagctttgccaacctctgcaaagtgactctgaaaaagatggcaagccctgctccagtcacacctggaagctgactggttcccgcatcaccaaagcatgaggaaattaatcacaggactcatttccctgaaaatttggacttgtacagtaaggacttcaactgaccttcctcagactgaggactgttcccaatatatacatcaagtcactgaggtaggacaaaagtttgctacagtcctattattttatggttattttaagtgtaccaggactctaaaaggaacttgtttgtataatgctattctatacaaggtatgtagcccacgaaatgaccagcctgatgtgtgctataacccatcttttttcctactgcccataaaaacaggcgaacttctaggtttcctggtctatgcttcccgagaaaagagaagcatagctataggcgactgaaaagatgacaagtggccccctgaaagaatcatacagtactatgggcctgccacttaggcacaagacagctcatggggataccgaatccccatttatatgctcaactgaatcatacgattacaagctgtcttagaaataatcactaataaaactggcagagcttcaactgttttagcccagcaagaaacccagatgagaaatgctatctataaatatagactagccctagactacttgctaacagctaaaggaggggtctgtgggaaatttaaccttactaattgctgtctacacatagatgaccaagggcaagtagttgaagacatagttagagacatgacaaaactggcacatgtgcctgcgcaagtgtggcatggatttaatcctggggccatgtttgaaaaatggttcccagcactaggaggatttaaaactcttatagtaggagttataatagtaataaaaacatgcttactgctcccttgtttgctatgtacttcttcaaatgataaaaagcttcatcgctaccttagttcaccaaaatgcttcagcacaagtgtactatatgaatcactatcgatctgtcttacaggaagacatgagtagtgaggataaaggtgagaacttccactaatgagagaggttctcaaacggggggaaaaagggaggagaccacccctcatattgtcttatgcctagtttctgcctccaaagaaagaagaagtgaaaactgaaaggcagaaatggaatccacaggcagatagcccagcatcatgccctgggcctgctagttaaaaatccacccctgacctaactgcttgtgttatctatagatttcagacattgtatggaaaagcatcatgaaaatccctatcctgttctgttctgttctgactagtggtacatgcagcccccagtcacataccctctgcttgctcaatcaatcatgaccttttcaggcggaccccgttatagttgtaagcccttgaaagggacaggaattgctcactcagggagctcagtttttggagatgtgagtcttccaatgctgccagctgaataaagccctttccttctgcaactcggtgtctgaggggttcttgtctgtgtctcatcctgctacaacagaggtgggcagatcacgaggtcaggagttccagaccagcctgaccaacatggtgaaaccccgtctctagtaaaaatacaaaaattagccaggcgtggtggtgcaagcctttaatcccagctactcagggggctgaggcaggagaatcacttgaacccgggaggcagaggttgtagtgagccaagattgcgccattgcactctagcctggtcgacagagcaagactccatctcaaaaaaattaaaaataggctgggttggtggctcatgcctgtaatcccagcactctgggaggctgaggtggatggatcacctgaggtcgggagttcgagactagcctgaccaacgtgaagaaaccctatctctactaaaaatacaaaattagccaggtgtggtggagcatgcctgtaatcccagctactcaggaggctgaggcaggagaatcgcttgaacccgggaggcagaggttgtggtgagccaagattgtgccattgcactccagcctgggcaacaagagtgaaactctatctcaaaaaataataataaataaaaataataaaaaataataatgaataagtaaataaaataaaaataagggataaatatgcaaggaaatagcataaagaaaaaacaatcagaacctcaggaaatattggacacacttataaaaatgcaaaatgctctggaaagtctcagcaatagaattgaacaagtagaagaaagaaattcagagatcaaagacaagatcttcaaattaacacaatccagcaaagacaaaaaaaaatgaacaaaaccttaaagaagcctgaataattggtttttctgaaaaagaagaaaaatctaaaagtttggaaaacatatttggggaaataattgaagaaaacttacctggttttgccagaggcctagacattcaaatacaaaaagcacaaagaatacctgagaaattcatcacaaaaagatcatcacctaatcacattgtcatcaggttatctaacgttaagatgaaggaaagaatcatatcatatatacatatatatatatacacatcatatatatatatcatcatatacacacacacacacacacacacacacacacacaatggaatactactcagccataaaaaggaatgaattaacatttgcagtgacctggataacattggagactattattctaagtgaagtcactcaggaatggaaaatcaaacattgaatgtcctcactgagatgtgggagctaagctatgaggacacaaaggcataagaatgatgcaatggactttggggatgttggggaaagagtaggagggggatgagggatagagactaccaatatggtgcagtgtatactgctctactgctcaggtgatgggtgcaacaaaatctcacaaatcaccactaaagaacatactaatgtaaccaaataccacctgtagcccagtaacttatggggaaaaaaaagagacttaaaaaaatatatatatatacaaaaattagccaggcatagtggtgcatgcctgtagtcccagctacttgggaggctgaggggagaatcactttaacctgggaggcggaggttgcattgagccaaaattgtgccattgcactccagcctgagccacagagtgagactctgtctcaaaaaatatatataaaaaataaaactagtaatccaggcaaaacaaaaatgaattatacattatgaaaatactctgccacatttttatactaaatcagccagtactgaaattttttagatgtgccatttgagtaaactgtgtgttccaagtcagattacctatgataacctctcagttatcagtgctatgaacctaaattgaagaaacaaacttgatatttaagaggacataaatttaatgttaagtgtgaactcatagagaacctagacagcagtgacttttttcattcctgagttcttaaagcttcctttatcaaaagcactgcattttatcactcgccacagaagagataaaaaatagtctaagttggcggggcacagtggctcatgcctgtaatcccagcactttcagaggccgaggtgggcagatcacctgaggtcaggagttcaagaccagcctgaccaacacggagaaactctgtctctactaaaaatacaaaattagctgggtgtggtggtgcactcctgtaatcccagctacttgggcggctgaggcaggagaatcacttgaacctgggaggcagaggttgcagcgagctgagatggtgccattgcagtccagcctgggcaataagagtgaaactccatctcaaaaaaatacataataataatctaagttaaatataaattaaatgtgtgtgtgtgtgtgtgtgtgtgtgtgtgtgtgtgtgtgtggtgactgtcctaactaccaaaataggttaggaccgtttttttcctctcaaacatataatcctgagaagacaatccaaacttcatgtacactttgggagaccaaggcgggtggatcacaaggtcaggagattgagaccatcctggcgaacacggtgaaaccccgtctcttctaaaaatacaaaaaaaaaaaaaaaaaattagccgggcatggtggcaggcacctgtagtcccagttactcgggaggctgaggcaggagaatggcatgaactcgggggatggagcttgcagtgagccgagatcgcgccactgcactccagcctgggtgacagagcgagactccatctcaaaaaaaaaaaaaaaaaaagcttcatgtacatttctgctacctgaggatctatttaaacatttgtaaagaaatcttattcaattgtcatgtttaatgcatattttcttgtagaataaaaattttctcatgggaaaagtctgatgttataacagtagcttaaaggataataaaaaatatgttttgctcaggagacatttctgaaaaaggctccaataatatacttatttcggccgggagcagtggctcatgcctgtaataccagcactttgggaggccaagaagggtggatcacgaggtcaggagttcaagaccagcctggccatgatggtgaaaccctgtctttactaaaaatacaaaaattagccaggcgtggtggtgggcgcctgtaatcccagctactcggtaggctgaggcagagaatcacttgaacccaggaggcaaaggctgcagtgagctgagatcgtgccactgcactccagcctgggtgacagagtacgactctgtctcaggaaaaaaaaaaaaaaaaatccgatttcactggagaagttataaactgttaaataagctattccagaaacaatagtattgagaaaatccaactaaattgacaggattgcttttgtaattgcagattgatgacaatcagattcactgagagtgaaaaactgttttgactattataaacttgtaattggatggcttatgtacctgataatagaacctcatgtgtgttctgttactgaagtttaatatgactaaatgcagcaaggctttaatgcgttatggcaaagcatattttcaccaggtaaacaaccttttatggtctattgactgaggacagaaaaaccctttatagtctagaacccagagattgagtctgcttgccatctacactgaagcaagacttcaggaccttgaaccttaggttgataatctcacaactgagaaggggccctccaaattcttgcaattgtatgcccattggagtttttttttttttttttttttttttggagacggagtcttgctctgttgcctaggctggagggcagtggtgccatctcagctcactgcaagctccgcctcctgggttcatgccattctcctgcctcagcctccctagtagctgggactacaggtgcccaccaccacgcccagctaattgttttgtatttttagtagagacggggtttcaccgtgttagccaggatggtctcaatctcctgacctggtgatcctcccacctaggcctcccaaagtgctgggattacaggcatgagccaccacaaccagccgcagatattaaggtaaagttaaacagggaagtttctcctaaaaagcaaaggcagctttgatgtagatcgctttcttcacaagatgaaaaatcaagacatctctactatcatgacactcttagattacggtttttttcttatggctctgcaaacaacagaaattaaaaagggcctcttgtgtgcactcatggggtacacttttatatgtagaagattttgcagccaacattatatatgaacaaacttatgccttcataagtaaaagatgaaggtccaatgaggatgagaaattttaatgggacatctgttgcctcataatatcagaaacagaatattggttcactgcagttaacctaattcataagttaaagagaacttattcagaatagattatagagtattgccaggaggccattactcttcaatggctatcatttgttaggtatttttgttccccatggtttagagtaaatgaggcaatggttagaaatttattccccctactagggctctatagcatattctattgtaaaggctatggttacacaatagactttaatttttctttttaaagttgtgcaaaataatagaatttctctagattacttactggatgaacagagaagtatctgtgcagttgctaaaacttgtagttgtacatagaaaaatatatcgggtattacagagattcagttgtaggagattaataaataggctgcttggttgaaatgaggagaccatttatttacctaattatttgatctatttaatgttagttggtgggctcatgagaccctggctaaaaagcatacttgaggccaggcatggtggatcacacctgtaatcctagcactttgggaggccgaggcgggcagatcacgaggtcaagagttcgagaccatcctggccaacatggtgaaaccccgtttctactaaaaatacaaaaattagctggacatggtggttcatgcctatagtctcagctactcgggaggccgaggcaggagaatcacttgaacctgggaggcgaggcagaggttacagtgagccgagctcacgccactgcactctagcctggcgaaagagcaagactccatctcaaaaaaaaaaaaaaagcatacttgaaactcttgttattatctttcttatagtcgaaatagtagtctccctactgcattgtattctctcaaaagttataaatgtttgtatgcagttatctctagaatgtcaaatgatctctctttaacagcaatcacaaaaactcaaatgcatatgtgaccatgaggacaccataacctatgaatgacctgataaggacaaaaactaaaggtaatggaaactgagagtggcattaagacaaagttttggtcacactcttacctatgtgagaacttaaccaaaaggggggaattttataaacaacattattgaaggccatcattctggattgagcttgtgcattacgcccaaagagaccaaaccaaatcaaatggagtcactcatgctaaatgtgacataatcaaactgaaaatgtaaggaaataggtagatcctaaaacaggccaggtttggttattcttttgaaaacagcagatttcaacacaaggaggtcacctgtactgtaacccttaaaaaaaaataataacctgaagtccttgtttccactttacaaaagctacagttctgctatttcacaatgggatttgagaataaataagtagatttttgatggtgacagaataatatcaatgtctaaagctttgttctagctctcaaaattgagaagatgatcaaaagggagaaattgttaaattaattatgcctaaagctgctcccttttctgtttaactttggtcactaggtttttttttaaacattgtaaactgaaacctaactggatatataaatagactgtaatccattattgtaccaaccactgtgtttttgccaataaaaggacatcaagtgttcaaattatgtttcaataaggcaaatcccaacctgtaatcaatctggctgtttctgtacctcacttctattttctgtatgtcactttgctttttccatccacaaacctgttttcataatgtggctttgccagagtctctctgagcctactctggatccacaggctgcccaatttgcaaatcattctatgctctattaaactctgttgaatttaatttctctaaaattttaaagtttttctcttttaaaagttttcaaatattttcttctctctctctctcttttttttttcttgagatggagtttcactcttgttggccaggctggagtgcagtggtgcgatcttggctcactgaaacctcagcctcccaggttcaagcgattctcctgcttcagcctcccacgtagctgggattacagacatgtgccatcacgcccggctaattttgtatttttagtggagacagggtttcctcatggtggtcaggctgatctcgaactcctgacctcaggtgatccacccacctcagcctcccaaagtgctgggattaggcatgagccaccgcacacagcctagttttcaaaaaaaatttttttttgagacagagtttcgcgctgtcacccaggctggagtgcagtggcatgatctcagctcactgcaagctctgccttccaggttcacgccattctcctgcctcagcctcccgagtagctgggactacaggcgcccgccaccatgcccagctaattttttgtatttttagtagagacggggtttcaccgtgttagccagatggtctcgatctcctgacctcgtgatccgcctgcctcagcctcccagtgttgggattacaggcgtgagccacagtgccagctcaaatattttcaatgataaaaataaataatgtgctgttgggctttgattttctaaactcatccctcagctatttcctcaaattattctgtcttcgaaatgcttctccaatatttttttttttttgagacagagtctcattttaccacccagtgtggatggcagtggtgcagccaatcatggcttactgcagccttgaccttccagactcaagcaatcctcctgcctctgccacctaagtattgggactataggcatgtaccaccatggttggctaattttttcatttttttaatggaaacaaaatcttattatgttgctcaggctgcactggaacgcctgagctcacataattctcccatcttagcctcccaaagtgctaggattacaggtctgagccaccgtgtttgcaaaatggtagcaatttttcatcccccttgtatccatgcccaatgccagatgcttttacagttgtttccatcaagattcagaatctgttttccaaaccctagatcaggctggccttatttgctcagggcagtagaaacctgtgaacatggcaatgagctagtttgggacctaggctcaaatggtcttgagtgcttctgtttttcttttagaatgttgacatcaccttggaaaaaagcccatgttagccagctggaaaataaggtatcatggggaggagaagcaaggtgtccctattgacaaccccagaagcagaacatcacccccagaagcacagctgcctagtcaacaagcagctgacgacatatgactgaaggagctcagctgaaaccagaagaatggccccactgagcccaacctaaatggctgaccatctcgattatgaactaataagttttggatgatttgttatgctgcaatagctaactaatacatgcacccagtgcagataggatgccaggattcaatgacaggttgattactagttatgttctaacagtgggcaccctataggtactgattttttcccctgatttaaagttgggtgacttgtaagagaatgttgagtaatgcagaaatacaggtagacatgtatgcatgtgattggtgcttatacccacacagtcccacacaccacaggagaaaacaggtaactacagcctgactagtagggccaaggccaatagcaaaataagttttgcctttaatctgttttctccatatctaaacatttgaggtcaagagtgtggacagatctgaagacacagagttttattatcctgtggccccaacattctttcttcactgtctgatctctggaagaaaagtgggcaacaggtggccagcagtggtctacctgtggttattttactcctgctgccatctgctctttttatggccactatctgttccacccttagaactgaagaaagatattggtagggagagactctgccttcacttctggcagaaaagggatgttcagttcattcacccccctgacatcagagctgaacttcaatgtggcagctattggccacgtgtgcctcctgagtgactggaatgtggctggtctgaactgcgatgtgctagaaaggtaaaatacagagttagtttcaaagatttagtttcaaatgtttatatacattattaataattacacattcctcacacattaaaatgataatattatggacatattgggttaaattgttacaatcaattcaacctgttccttgtttctttttcaagtttgtctactagaaaatttaagattcacatgtggctcacattttatttcagaagattaccatctttttaaaatctgaggctgcctcctttagccgggaaggtcataaaatctgaaattttaaaataattattgttacattcttttcatttttgaatagccactatatatatataaatataaatatatataaaaatatataaaaataaaaatataaatatatataaaaacataaatatatataaatataaatatgtataatatataaatatataaaaatatataaaaatataaatataaaaaatatatataaatataaatatataaatataaatataaatatatataaatatatacatataaatatataaatataaatatataaatatataaatataaatatatataaatatataaatatatatatataaatatataaatatataaatatatatatataaatatataaatatttatatataaatatatataaatatataaatatatataaatatataaatatatataaatatatataaatatataaatatatataagtatataaatataaatatatataaatatataaatatatatataaatatatataaatatataaatatatataattatataaatataaatatatataaatatatataaatgtatataaatacataaataaatatataaatatatataaatatatatataaataaatatatacaaatatatataaataaatatatataaatatatataaataaatatatataaatatatataaataaatatataaatatataaatatataaataaatacatatataaatatataaaatatatataaataaatatataaaaatatatataaataaatatatataaataaatatatatatatatatatatatatatattttagacagagttgtgctcttgttgcccaggctggagtgcaatggcacaatctcggctcaccgcaacctccgcctcccaggttcaagcggttctcctgcctcagcctcccgagtacctgggataacacacatgggccaccacaacccgctaattttatattttttataaagactgggtttctccatgttggtcaggctggtctctaactcccgacctcaggtcatctgcccgcttcagccttccaaaatgttgggattacgggcgtgagccaccgtgaccggccccatatattatttataaatgcatatgaccttacacacaaggttaaatgcaaataacctctggggtgggcctggctcagctcagggaggaagccctgtcagagaaggatgcagcccaagctgtcactcttctttcagccccgcatctcatcacatcttccgtcaatcatggcctgagggggcggggatttaaatgttatccaatcagagacgctaggcagggaaccgtccaatcaggcacgcaggtgaagcggacagggcggcttccgggtttggcggggcctttgtccctcgctgtggcctgagctccaggtctcgtcttcagcgctctgtgtcctctgctcctagaggtccaggctctgtggccctgtgacccgcaggtattgggagatctacagctaagacgccaggaacccctggaagcctagaaatggtgagagtgccgggtccgacatccccagagaggggaggggctggttgtaatgggtgggaagtggctgtggcgggactcaggcctcccggcagtcagctgcacaatctgcgccccgagttcttgcccagctgggcctcagtccccatcagccttaagatggcggctgcgctgacaggcgggccccagcacgtcccgtctcttccttgcgcagtgactgtgccctggcctggagccctctctgggcagctctgcatccgcagcgccgcgtctctcccagactgtgcagggaccacgggaggatcgtcacgggagaatcgtcacgggagaatcctgacttggggtgcgagttcatgaatgggaagaactttggtcctgggttcctagttcctcttttctcctattaaaaatgtacagaccgggaggggtggctcacgtctgtaatcccagtactttgggaggccgaggcgggcgcatcactaagtcaggagagttcaagaccagcctggccagcatagtgaaaccccgtctttactaaaaatacaaaaatttgccgggcatggtggtacacgcctgtagtcccagctacttgggagactgaggcaggagaatcacttgaacctgggaggtggagattgcagtgagccgagatagcgccactgcactacagcctgtgtaacagagcaagactccgtctcggaaaaaaaaaatgtacagaagtcaccacaaaaatattaaagaaattaatcaaagagtgattaaaaaactgttgagcacccagctgtggtttgtaatttgttgttcatggcggggcttgaaggaaagacttttataaggtgcatgatgaagaaagccaaattcagtaattggttaggtaccgttatgtagtttcttagtttgtacaataaaggtgaaaattttctggttgtgtaatcagaccttaattggcagtatacagttgattaagcctgaattttgtgtctttcaatgtagtaattttcaaaacgatgcgcctgagttagattttttttttttttttttttttttttttttgagatggagtctcgctcttgtcgcccaggctggagtgcagtggcacaatctcggctcactacaacttctgccgctgcctgtgttcaagcttctcctgcctcagccttttgagtagctggaattacaagcgcctgccaccctgcccagctaatttttgtacttttagtagagacggggtttcaccatgttggcctggctggcctcgaactcttgacctcaggtgatccgcctgccttggcctcccaaaatgctgggattacaggcgtgagctatcacgcccagccacgttagatctttttaaaagtaggaacccagggtctagagacacctcagtctaattgcctgccactcaattattttcacactccacggggaactgattttctgctgcatttttcacctgtgtcccaagcagggtcttaagtctaacccccgtcccccatttctccagcctcactctggcttgcagtaagatactaaatttccagttctttctggcgttcccaaatgccaacttttcctacctaattcacattatcacctatttgtcctttagtgtacattttttacaccgtattttaattagttattttctgacaaagtattaaatggtgcttttaataagatttgttatctgtttgtaaatatttcccatgtgaagaaagcaaagaataatcccctgacactgtgttgtaaaaactctctgtgcttcttctccttgtatcttctctgggcacagagatcttgtctcaggatgtttttgggtcagggttttcctttggaaactttatggggtgttgtgtcctcagtcacccttcagtttttttctggtcctgggtttcagtattgtctggggataaaccaagatatccgccatggttatgtcagttagagtgtctagtggatatcagcttctgggttattttctcccataggagaacctgaagtctggagtgtatcctctcaaggaagcaagtggatgccctggggctgacaggaatcttctggtgtactctttttatgaaaaggtaaccccttgagatgttaaaattgtcttcacccaacccagctttcatttcttggagacacattgctggtcaaccaatcagactgtggcattgaggggaaaacaaataatttttgcctctggattgtctaagggggcagaaaaatagtgaaataactatagtgaaagtaaaatagtggaaaaaagtggaacatttgtgacagaaaaaatagtatcccaaaagacaaaaagaaaaagaaaaacactgaccccagtgagatggcgtaagaacttgcaaagttaaatgcccgtgggacagtcactggggcatagtgtggtatctcctgagtgggtggttcttgagcacataagtgagcaggagtgggtggaagactgtttgaagtgattgaatggcctgacttgaaacatgagtcagacacatctgttttttcatcagcactgccactccctgggtttgtcaccttgaaaagatttgttcatttattttaacctcagttttttagctgtaaattctattagtagggcttgaaaggtaggaaaatatttaccaaaggcataaaagtggtgggtttaagaaaaaaaatagtatctaataatatattccattcattaaaaattctctattccctttttacccccagggtgagtttaggaattttctcaggtgtgttttttatggctgggtgatttcaaacagaattctaaggctcagcttttagaatgctaccaaggaaatgagtagggaaaatctctgttccatttttttgtagaaaataaatacatttctacaagaaaatgtggtagataattggtgagttacatacattcatgaaaacatgagtttctctctctgcagggtaaatttgtgacagtaaacatctctgttcaaatcctgttatcttgatttctgagtttcatgctaaattttatgagatgaaacttggtaccacctagaagttttcccatatgactaactgtttactaaatgattcttaatggaattcataaaataatgcatacattatgtgaaagaaatagatattttgctttttttattgaggtataaattgcaaacaccttaaaatttccttcccttgtatgaacactgtgactaattttgctagatttttcaaacacatagtttcaaaaaccaagtgagtaactctaacatagaaattaaagcttgagcccagtgactcagagctaaggctaatattgagcctgcaaaaggagtttattacaggcccagttagttttttttctggggagcctcccctgcagatgtcctagcctgctcactctagctgtggaagaagcttttctgctgagagaagctacagagtcctggaaaggtggggacccacaggcagatgcagttaaggttaagatggtaggagattgagagggtcttactgatgataaagttgttaatgtttgaaggcagtttctagactttgtaatacctaacaaagttagatttatgttaaaaatttgaattccaaaggactattgcaacaggaggaaataccaactgtaagaaccttaaggattgcaaagtttaggcagaaaagggctttctttcatggggaggagcaaacaaaattagaagttggagacggccggatgctgtggctcacacctgtaatctcagcactttgggaggccgaggcaggcggatcatgaggtcaggagatggagaccatcctggctaacatggtgaaaccccgtctctactaaaaatacaaaaaaatcagccgggcgtggtcacgggcgcctgtagtcccagctactcgggaggctgaggcaggagaatggcgtaaacccaggaggtggagctggcagtgagcctagatcgcgccactgcactccagcctgggtgacagggccagattccatcttaaaaaaaaaaaaaagaagttggaggtgactgacaaatgaagggtgaaataatcagattttagatcagagaatgttttaccctgaagtcagcatgttcttaggagggacataaaatggagttgtatattggctcagattgagggtagctccaagttcaggagcctgtgaaaaattttatttagaccactgaagacaaattcagctgatttttttaaatgagaaaaagaaaatgtgcagagttcttatcggaaaggggtcacaatccacaccccaagagagggttcttggatttcgctcaagaaagaattcagggtgagtctacagagtaaagtaaaagcaagtttattaggaaacagaaggaataaaagaatggcttactctataggcagagcagccctgagggctgctggttgcccatttttatggttatttcttgattatatgctaaacaaggggtggattatttttgcctcccaattagacaatataaagtcattttctgatgtttccatgatgtctccatggcattttgtaaactgtcatggcactggtgggagtgtagcagtgaggaccaccaaaggtcactctcatcccatcttggttttggtgagttttatccaccttctttactgcaacctgttttatcacccagatctttataacctgtatcttgtgctgaactcttgtctcatcctgtgacttagaatgcctaaccatctgggagtgcagccccataggtctcagcctcattttacccagcccctattcgaaatggatttgccctgattcaatacacctctgacatttctccttttttttttatctgagacggagtctcactctgttgcccaggctggagtgcaacggcatcatctcggctcactgcaacctccacctaccaggttcaagtatttctcctgcctcagcctccccagtagctgggattacaggcgcctaccaccatgcctggctaatttttgtacttttttttttttttttttcagtccaatcagtttactctgctttctccatctcctcctcccattagtcagccattggaactgggaaacctcctactttccccctctttgtactctttccacaattcatcttgtctttctgcagccatatcttcttaatacagactgaagtttctgtcattgagaacagagtgatccataaacctggtcatcacactttttatgagatagtaatgtgggccccagatccatggcatggtttcctctggatgcactcctggatctaatttttgtatttttagtagagacggggtttcaccatgttgaccaggatggtctccgtctcttgacctcatgatccacctgcctcggcctcccaaagtgctgggattacaggcatgagccatcatgcctggccgtaatctctgacttttttttttttttcttgagacggagtctcactgtgttgccccggctggagttcagtggcacgatctcagctcactgcaacctccgcctcccaggttcaagttattctcctgtctcagccttctgagtagctgggattataggcgcacgccaccacgcctggccagtttttgtatttttagtagagatggagtttcaccatgttgatcaggctggtctcaaactcctgaccttgtgatctgcctgccccagcctcccaaagtgctggggttacaggcgtgagccaccgtgcccggccaatctctgacttctttaagcagtgttttgtgattcttgtcatagggatctttcaccattctgattagctgtattcctagatattctattctttttgtggcaattgtgaatgggattatgtttttgatttggcttttggcttggatgttttgatgtacagagattctactgatttttgtacgtgtattttgtatcctgaaactttgctaaagttgtttattagtttaaagagctttcctgctgagactatagggttttgaagatatagaatcatgtcatctgcacacagggatagttagacttcctttcttcctgtttggatgccttttttcttttcttttctttttttttttttttttttttttgagacagagtcttgctctcgccaggctggagtgcagtggtgtgatctcggctcactgcaacctccgcctcccaggttgaagcgattctcctgcctcagcctcctgagtagctgggactacaggcacatgccaccatgccaagctaagttttgtatttttaggagagacggggtttcaccatgttggccaggatggtctcgatctcttgacctcgtgatctgctcacctcagcctcccaaagtgctgggattacaggcgtgagcccccatgcccggcagatgccttttattttcatctcttctctgattgctctggccaggatttccaattttatgttgaataggatgtttgagagaaggcatccttatcttgtgccagttttcaaggaggaatgcttccagcttgtgtccattcagtgtgttggctgtaagtttgtcgttgatgtctcattgttttgaagtatataccttcaatgcctagtttgttaagggttttaaacatgaaaaatgttaaattatattgaaagtatttttagcatctattgagataatcttggtatttgttattagttctctttatgtgatgaataacatttattgattgtatatggaaccaacttgcctcccagagatgcagcctacttgattatagtggattagctttttgatgttcttctgaattcagtttcccagtattttgttgatggtattttcatcaatgttcatcaaggatattggcttgaagttttcttttttttttaatctctgccaggttttgatatcagaatgatgctattcttatatataatgagttgaaaaggagtcctttcttttcaatattttgaagtatttttagtagaagtggtactagctcttttttgtacatctggtagagttcagctaggaatttgtctggttctttgcttttttttggctagtaggctatttcttactaattcaattttggagcttgttattggtctattcagggattcagtttcttatttgttcagtctctggaaaatgtgtctttgctcccaggttactattctcaagcttggcccaaataaactcttatattcatgttgcctcagctttttccttttaggtagtcatatcacgtagaatgagctagagcagcctctatgaggggatctctcctttgattgtactccacttgctgtaacacccaagaatgcagagtgtggttgatcctacctagaatctgcacataaggtctggcctcttcctgggatttacaggacacggccagactttaggttgagaatgtacagaaaaccaacaggaggcattttctccattgtgagttgtcaacatagacatcttaaagccccctttgacagtgtggttctttaagcttttcagatcttgttcagtgatttgccacagttatgtgagaggctccagatataaatagaatctgatgacagaatcagcattttaagagtgagatatcaaagtcataatgtatccatagccatgaccacaactatacctacctgtaaaatgtgatactggagtagagtattcttgtctttctccttacccaaaagctagcaaattgggacaagtgattaggttctggagctccaccaggccattttctatttagaatcagcctgaatctctccagcctggattatcattgggccatcagcccagggtcactaagaaccctctcacaatcacctagacgtctttgagacatttgaggatgtccagggcagaattgtgtcaggctgacaagagtggttaattctgcttctggcttggtgtaagagaaatgagtcattctgtgtgtgtgtggtttttttagggttttttttctttttttagacggagtattgctctatcgcccaggctggagtgcagtggcgcgatctcggctcactgcaacctccgcctcccgggttcaagtgactcttctgcctcagcctcccaaatagctgggaatacaggcacttgccaccatgcctggctaatttttgcatttttaataaagacagggtttcaccatattgcacaggctggtcttgaactcctgaccttgtgatccgcccacctcagcctcccaaaatgctgggatcacaggtgtgagccaccatgcctggcaattctgtgtttttttctccccttatacaagagataactttggttggtacccagatgagagtttctcaagtttcctgatacttggatgaaagcaataggaggtctggtgactcaaacagataaagtaattgttttcattttatatggccattcaaaaaacagatgaagcagtcatgatccttactatccaggaacatgtctagactaacaactggatacatgggtgaattaagcattatatggttggtacaatgaatagatgtgtccaaaaaaaattggggccactgttttatattgttacttctgataccatcagctgaggagatatttatggagtgaagatttgttattatttgtgtttcctttactttgctaagaatatatatttatcttctagtataattattctaaagaactttaataaatttgtttaaattgcttattagtatatgttataaaattgacagggcagtggcaaaaatagattaaagttacataagctctgggatttaagattctcttatgtaagcttaggaaaaacagaactggaaataccttggtggcagagagaacataattctacatagggtcctttccctgcccaaattctgttcagattcacgttttttggaggccttatttatgtctggccccgctctggagccttacctcacaaaactgatttataaaaatcagagttttggctgggtgtggtggctcacacctgtaatcccaacactttgggaggccgaggcagacagatcatgaggtcgagagtttgagaccagcctgactaacatggtgaaaccccgtctctactaaaaatacaaaaattagccgggcgtggtggcacatgcctgtaatcccagctgctcaggaggctggggcaggagaatcgcttgaacccgggaggcggaggttgcattgagccaagattgtgccactgcactccagcctggtgacagagcgagactccatctaaaaaaaaaaagactggagttttgtctggtgagtcctgctgcttttctagagctggtgctcacaattttctgaaacccaaaaacagataaatgacagaaataaactatttattttaggatcttattttttgaatttgtattaaaaccagtgcttacagaaacattccatttagcaccttgttttctgtttctgccaatctagcagttgctccacaagccacaaacaagtaaatgtatacacaataaaaatttctctaaactacattaaactttttctatgttcttctcatctgcctgtatttaacttttattctatacctttaaaacaaaatcaatgacagagaaacagagggagaaataaaaatgctgaaccctttatctaagtcctgggaattattgaacacttagtatcaacttccagggtgttattaggattaaatcacaaaatgtgttattcccagcacagtgctctgtaacatatccttgagcacatagtacctgcttaataaacattgcatttgtatatgtgtacatgttattttccaaaggcagatttattcagacattgccgccttctgtttgttctgtaaactttaaagagccagcgaagaatataaaaatttaagatggagattggttttatttgtaccagaagtatttgtgttgtgacaagagtgctaagtgtaagggactctgtgctgtacctgcttctctaactaatgctaatgagcccagggggaacaacatcagcattgacagggaacttgtttgaaacacgcattcatgaacccttttcaaacttgcagatccacattacgtagagtggggccaaaattaccaaacgagttttaagctcattaaagtttgagaggcagtgcttagctaagtggttatcagccccgtcttgttttttttgttttgttttgttttctgtttttgagacaggatctcactctgtcacccagtctggagtgcaatggcataatctcggctcagtgaaacctccgcctcctgggttcaagccattcttatgcctcagcctcctgagtagctgggattacaggcacccgccaccattcctggctaattttttgtgtttttagtagagatgaggttacaccatgttggccaggctgatcttgaactcctgacctcaggtcatccatgtgcctcggcctcctaaagtgccaggattacaagtgtgagccaccgcgcccggcctctgcccagtcttctaattaggattacatggcagaaatctctgtacttatgccctttccatggatttcgtttattgttctgggtggaagcatccatgttgttttaatgaagtgcctcatgtgactctaaggtgaggccagaatcaagtatgagggcttcaatatacattcatgagagctaagtgccacctttgcactaaagggtggtctcagggcccgttctgtttgggtttggtagggacaggggagtgtggctcatatttccattactgtagcagaaattgctggtgtctgtggcagaggagggcacctaaggacaggaaaagagaaacatacttttatattcatagagcagctcgttgttcctgaatcctttctgttataaaggacagagaaatgggtggactttttctgcaggaccttccttctgtttgtgtgcgtgatggtagcagacaaaaaggtggtgctgacatttttaaaggaacgttctcaaaatgcaggtataacttgtccagagaatgttatctaaaaaggattttcagagaaagaaagagaaaaaatggctttttttcagctaaacgtgtctcagaagaagagctgtgtgcactctgcttcatggaatgccatgtgtttagtacttgcaaatctttacttctcgatttgtgtttttccttcttaaggagtttgttttaactacattaaaaaattcttataatattcaaggctgtctgcaaaacatttctttactatataccagagctttctctacattctctacatcatggcttcttatatgccacgcagaattcctaccataaatttataatcggcactactaaaaatgttccctttgtggctgttaaacatggggagatgtagatactcaagattcctattgggggaaagctggggtccctagtaaagatggagaatatgtaatgttgaggtttcatctgttttctctattaactctatgcagaacaggattaagaaaatgcttatttaaacagaataccatttattacccagaaagttctgaaaaaaattattaggagatacctgctctctagggtgctaaagaaagactacttaaaatcactgttaaaaataacagaacatgggagatatctgtattttgaactttgtataaaactgatgtatctttatggttgcattcagattataatttactgtttgaggggcaatatcttagcagtgatgccgtgttcttctatgtgcatcagcacatcataaaaatttgttggctgggtgtggtggctcacacctgtaatcccagcactttgggagggcgaggtgggcggatcacctgaggtcaggagttcgagaccagactgaccaacatggagaaaccccgtctttactaaaaatacaaaattagctgggcatggtggtacatgcctgtaatcccagccacttgggaggttgaggcaggagaattgcttgaacccaggaggcggaggttgcagtgagccgagatggtgtcattgcactccagcctgggcaacaacagcaaaactccatctcaaagaaaaaaaaaagaagaaagaaatttagaagttcagactttactccagatcttctgaagaaaaaaagtctgcacaacagaatctccagtttattgttcacctttaaagttgagaggtaccttcgaactcaacatgtcttttttgtctgaaaaatatacacaactcaaactttatgatgtaaatatagcactcgaagtgtacaaatttttgtttatgcccttaattttatgcttctcatccagagaagtatcatatatatactggtgttatggatcttatgccattctcttctctcagagttagagaaaacattagataatatttctgtgtgaaaaattattggggccgggcatggtggctcatgcctgtaatcccagcattttgggaggccaaggcgggtggctcacctgaggttgagagttcgtgaccagcctgaccaacatggagaaaccccgtctctactaaaaatacaaaattagccgaatgtagtggtgcatgcctgtaatcccagctactcaggaggctgaggcaggagaatcgcttgacgccgggatgcagaggttgcctctgtctcaaaaaaaaaaaaaattattggataatttcagtcattcctgcaaatcagaaccaattctctttattctgtcatttcactttaattcaaataataaattctgcccgtggccacttggtaaatatacgtgtgtcttgtgtgcttgtgtttttcaggggccattgacatttagggatgtggccatagaattttctctggaggagtggcaatgcctggacactgctcagcaggatttgtatagaaaagtgatgttagagaactacagaaacctggtcttcttgggtgagaataactttagtacacaattactagtataccctaaaggtttcatttctcattttttgagaataatttttggtaatttatgctttgcataaatgagtttctgatacttgttcttaagaaaaccttgaggatttttccatataggaaagaattttttcaagaagttttatcttgacttaaactttccacattcctgggctgatctgtatccttcactctagattagtggcaattccagaaatttagtggcataaaatattgttgcccatatcttaaaatctatttgccgccaccaatttttgattaatgaatgccaggcagtgaaattaagaacctacaaatgtaaaatattttctaaatacttagaaatttctgttataaattagtatttttaggattaattttctagaatattctaccacatcctctttactaagcacagtactaggttggtaactgaagaatatgagaaagattcatgttatttattttcaataaagcaggtattgctgtttctaagccagacctgatcacctgtctagagcaaggaaaagagccctggaatatgaagagacatgcgatggtagatcaacccccaggtaggtgagagtgaacacaacagacgacatgaatgagaggtccaaaaaagaagaaagccaatgcttaaaatgttatttgagaatctgtgttccaaagcaaatattttctgggaagcctgagtttttttttttaattttgccctcgcatagggtcatcttctgtcttatgcttttaaattcaaggattctttccccttggtgatctcccttcaagtttgctatcagaaccaaagtcctcttcatggcatgcgagactcacaatctgactgcttttccattgttttgggggacacacaaatatctacatgattttgagaaactctatgttaaactattttcttttcttttttctttctttttttttttttttgagactgagtttcatgctcgttgcccaggctaaagtgcaatggcacgatctaggctcactgcaacctctgcctcctggattcaagcaattctcctgcctcagcctcctgagtaggtggaattacaggcacctgccaccatgcccagttaattttttgtatttttagtagagacagggtttcaccatgttgggcaggctggtctcaaactcctgacctcaagtgatccacccgccttggcctcccaaagtactaggattacaggtgtgagccactgcacctggccaaactattttcttagttctctttttgcatcatgtctgaaatgtgtaatagtagtggtttctgttccactgttttttgttgttgttgttaacttttctgcacactccattctgttcttattactatattctcgaaatatagtttgaaattataaagcatcatgtctttctactttgttctttttcctcacgattgctttggctatttgaagtttattgttgtttcttgtaaattttagaattgtattttccattactgtgaagaaaaatgccactgaaattttgatagggaatttattgaatctatagattacttagataataggacactttaacaatatttattttttcaatctgtagacatgcaatatttttaaatttgtgtcttctctaatttcttttattaataacatatctttcgttgtaaagattttttacttccttgttctcagaaatttatcattttaatgctattttaaattgttttctttctctgttaaagtgtatggaacaataacttcatacttgtgtgttaattttatgttttgctaatttactgagtgtattaattcagacaaatttcaatgtagtgttcatggttttttatatataaaatcatatgatccacaaacagcaactttttacttgtgttcaatttcagtggctttttaaaaatgtttttgactcattattctgccacatacttccagtgctatgttaaaatagaagcattgacaatgggcacaatgtagttttgcattagtgtctgtgaatttgaaggagcaaacaactcctcaagcttctataaactggtttcagtaggtaaagatctttttctgtcatgtctccagggtcatagaatgctctctgggtttgtagtggagagggggtgtagcttggtcacaaggctgctgggtctgcactagggtccacctttagttggcttgttacaggggcttgggtagtggtaattcccattttatttttggacagactgaatatccttcaacactttgatctgtagagcagacaatagggcaggtttctgcagtcaggttcatatataatggtccttatatcaggatgtgaatgagtatggcgtttattgagtaccggagaggattactgtagttatgcagacaaattcttttttaatggtatatcagtgttgcacagcagattttatgagtaaatatgtcacttactattactgcgcagtttcatatcagtgttttgttagtgtaggtttcttaacattgagttattgtgtttttttgtttcacttttgtattataattttagacagtttgcaattcggtttatctcttataattaagagataaatcagccatatgtctgtcacaattagatatatatgtgtgtgtgtgtttatctataaatatgaccccaatattggttatggcttatcttgtatatattctttcttagccaattttcagtggttgttttatctcacctaagtgagtagtcatggaaatattttcaccatctcttattttcaccatgtgtttaatgatgatgtttctctcacctttgtgtgagagaaacacttttgtaatttgaaggtaatttttgaaaagatttataaatctgtatttttttcagtttttcctttagaaaaattaattgttgtaaaaacacataatatttaccatcttaaatctatttaggtgtaccttttagggccagacatggtggtggctcacatctgtaatccaggattatttgagctcaaaagtttgagaccaacctgggaaacatatggagagtccctctctacaaaatgttttttaaaaatagccaggcatagtgttgtgcatctgtggttcaggctacttgcaagactgaggtgggagggttacttgagcctcagagtttgaggccgaagtgagccataattgtaccactgcactccagctttttgacagagtgagactgtgtctccaaaaaaaaaaaaaaaaaccacagctctacatttcaggcaggcatgttaattatattcacattgttatgcaaaagacttagatattttacattttgtgaaactaaaactcaatacccattaaataacagcaacccattttaccctctttccagcccttgacaaacacccttccactttctgtttttatgagtgtgactaattaaaatatcccatatcagtggaatcatactgtatccatcatttcgttactggcttatttcaggtgacataatattctcaaagtttatcttaaaatgtgacaagattttcttttttttttttttttttatttttgagacggagtctcctgtcacccaggctggagtgcaatgacgcaatctcggctcactgcaacctctgcctccctggttcaagcgattctcctgcctcagcctcccgagtagctgggactacaggcatgtgccaccatgcccagctaatttttttcttatttttagtagagagagggtttaaccatgttggtcaggctggtctcaaactcctgacctcaggtgatctgccatcctcggcctcccaaagtgctgggattacaggtgtgagtcacacgcttggcaagattttgttttttaagactgaataatatttcgctctacacatatgttacatttttgatatgcttataaatcaagagacacctgggttgctgcagccttttagcttttgtgaatactagtacaataaacatggatgttcaaatatgtcttccaggtcatgtgttgcatattttaaattgataaagaggattgctgtatttgatgataattccatttttaattacttgagaaacatttataacatttaaaaataatgactgcatctttgttttctaccaacaattgacataggttttattttcattgcatcatcaacagatttggtgtttttaaataatttatagtggccattgtaatgggtatgacatgatttcatttttcattgttatttttatgtgtttctctacaaattattaattttgcatgtcatttcaaatgctttttccatttgtgtatcttttatgataaaaatttagttcaattgttaattttcaaatcaagttatttaacttagttttaagggttttttatatattctgaatattaactgtgacatgtaatttggaaatattcttacccattttctcggaggcattttcactgagttaaatgttttgttttaatgtgcagaaattttgaagtatagcatagttaattttttgttgttgttcctcaggcatttagtgtcttatctaagaaaatggtgccaagaccaatgtcatgtcttctttctatttttttctaagagacttattagtttttttatgtctaagtattttacttaaaatatttttgtatatgattcaaagaaatgatccaaccttattttatcagtattgatatttagtttttaacattgttttttaaaagactattgtttcctcttggcagctttgtagatcatttgattatatataaaaggtttcatttctgggctccatattttgttctttcatctgttcatctgcctttgtgtcaatattacactgtttttgttactgtagcttctaattttttattattatttttgagatggagtctggctctgtcgcccaggctggagtgcagtggctcgatctcagctcactgcaacctcctcctcctgggtttcagcgattattctgcctcagtcccccaagtagctgaggttacaggcgtgcactaccacgcctggctaatttttgtatttttagtagagacgggggtttcacaatgttgaccaggctggtctcaaactcctgagctcaggtgatcccccaccctggcctcacaaagtgctggcattacaggcgtgagccactgcaccctgcctaatatgtttaaaaatcaggaagtataatgcctgtttattctttttcatgggtgtttggctatagttcataatgaaatttaaaaattttaaacaatatttgtgtaataaaactgtgctattgtcatttttatagaggttatattgaatttgttcaccactgtaggttgtattgacaacttaactaaattaaactttttgaacctttagctgaagagtgtgtttgattgactgattgattcgagacagagtctctctctgtcatccaggctggagtgcaatggcatggtctcggctcacttcaacctccgcctcccgggttcaaggaattctcctgcctcagcctcctgagtagctgggattacaggtgcccaccaccatgcctggctaacttttgtatttttagtagagacggggcttcacatgttggccaggctggtctcaaactcctgacctcaagtgattcgcccacaccagcctcctgaagtgctgggattacgggcatgagccaccatgcttggccttatttttattttatttatttttatttttagagacagggtcttcctatgttgcccatgctagtttggaactcctggactcaagcaattttcttgccttggcctctgaaagtgctagtattatagccgtgagccactacactcggcccatgtgtttttttttttcaaatatattattggatttaacagttttacttttgctatttatttatttatttatttatttatttattttactgagacagagtctcactctgttgcccaggctggggtgcaatggtgtgatcttggctcactgcaaactccgcctcacaggttcaagcaatactcccgcctcagcctcccaagtagctgggattacaggcacccaccattatgcccggctaatttttgtatttttgtagagacaggttttcactatgttggccaggttggtcttgaactcctaaccccaggtgatccacccaccttggcctcccaaagtgctggcattacaggtgtgagccaccgcacccggcctacttttgcttttaatttttagtttcattcagttttggtcagaaaacacacagtgtatgattttggttttcttatatttatttgttgttgttttgaaacaggatcatactccgtcacccaggctggagtatagtggcataattttggctcactgcaacctcagtctccttgactcaggtgatcttttcttcctcctaagtagctgagactacagacatgcactaccgtgcctcgctaattttttgatttttttgtagtgacagagtctcactatattattcagtctggtatcaaacttctggtcccaagtgatcctcccaccttcatcttccaaattgttgggattagatgtatcagccactactcccaggtggtattctttaataagacttgttatgtgtcctaacagaatatatcacatccaaataaaaatattgtgtattctcttgcttttaactggaaagttttgtacatgctgttaagcctatttggtctgtggtacagtttggatgtccatgttctgcaaggctcatgctgcaatgtaatacacaatgttggatgtggaacctggtaggaggtgtttgggtcatggggactaattctcataaatgccatggcaccattcttttagtaatcagaaagttttcactacattaattcaaatgagagctggttcattaaaataacctgtctccttcacctcacacttgctctgtctcttaccatgtgatatgtccagctactctgccttccactaagattataagtttcctgagaccctcaccagaagcagatactggcacacacttcttatacagtctgccaaactgtaaaccaaataaacctttttactttataatttatccactctcagttatttgtctatatgcaaaatagttaatacagtctataatgttgtctgttttcttactgatcttttatctaaattttctatttattattgcaaatgggatcttgatgtctacaattattgtgttgctgtatatttcttgctttacctttgccaaaatatgctttatatatattggagtcctgatgttatatatacatatacatataaacataaatagatagatatgatagttatagattcttgacccatttggccattatataatatcagtgtttgtctcatgttagtacttgacttaaagcatattatattcaatataattactgccacctcacccaattatggttactatttgcatgtaatatagattcttttcattctattactttcagcctatttgactcaatgctaaaatgagtctgttatagacagcgtattgtatgcttttttacttaaactactcaggcatcttatttctttttctttttataaatttatctatttttgagatagagtctcattctgtcaaccaagctggtttgcagtggcatgattacagctcgctgcagcctcaacctcccaaactcagatgatctcatctcagcttccaagtagctgggctgcaaatgtgtgtcgtcacgcccagctcattttattgtttttgtttttgtttttgtagggacagaattttgccatgttctccagtctggtctcagactcctgagttaaagtaatcagcccctctgggcctcccaaagtcctgagattacttttttttattaagtagtttaattaatttatatttaaaatgattgcttaaagaaataaagttactattaccagtttcattgttattgttttgtttaaatattattttttgtgtgttctgggatacatgtacaggatttacaagtttgttacataggtaaacatgtcccatggtggtttactgcacctatcaattcatcacttaggtgtgaagccctgcatgcattagctgtttatcttgatgctgtttcccctactctgacaggttccagtgtgtgttgttcccctctatgtgtccatgtttgtttttgtttttgttgttgttgagacagagtcttgctctgtcgccaggctggagtgctgtggcatgatctcagctcactgcaaactctgataccctggttcaagcgattctcctgcctcagcctcccaagtagctgggattacaggcatgcaccaccattctcagctaatttttgaatttttagtagagatggggtttcgccacactggccaggatggtcttgatctcctgacctcgtgatctgcccacctcagcctcccaaagtgctgaaattgcaggcatgagccaccgtgcccagcccatgtgttcttattgttcggctctcacttacgagtgagaacatgtggtgtttggttttgtgttcctgcattagtttgctgaggataatggctttcagctttatccatgcctttgcaaactacatgctcttattcttttttatggttgcatagtattccatagtgtatatgtaccacattttctttatccagtctattattgatgggcatgtgggttgattccatgtctttgctattgtaaatagtgctgcaatgaacatacacatccacatatctttataacagaattatttatattcctttgggtatatacccagtaatggggttgctgggtcaaatggtatttctgtttctaggtccttgaggaattcccatagtgtcttccacaatgattgaactaatttacattctcaccgacagtgtaaaagtatttctatttctccacagcctcatcagcatctgttgtttcttgactttttaataatcacgattcttggccgggcacggtggctcacacctgtaatcccagcactttgggggtgccgaggcaggaggatcacaaggtcaggaaattgacaccatcctggctaacacggtgaaaccccgtccctgctaaaaatataaaaaattagctgggcgtggtggcggacgcctgtggtccccgctacttgggaggctgaggtaggagaatggcgtgaacctgggaggcagagcttgcagtgagccgagatcgcgccactgcactctagcctgggcaaagagtgagactccatctaaaaaaaaaaaaaaatttagaaaaaaataaccactattcttactggcataagatggtatgtaattctggttttgatttgcatttctctaacgatccctgatgttgagctttgtttgtttcttggccacataaatttattcttttgagaagtgtccatgttctttgcccactttttaatggggttgttttattcttgtaaatttgcttaagttccttttagactctggatattaacgtttgtcagatgaataggttgcaaaaatgttctccgattcttaggttgtctgttcactctgatgatagtttttttgttgttgtgcggaaggtttttagtttaattagattctatttgtcaagttttgcttttgttgcagttgcttttgacgttttcatgatgaaatctttgtccatgcctatgtcctgaatggtattgcctagattttcttctaacgtttttatagtttttggtttcatatttaagtctttaatccatcttgagttaacttttgtacaggtgtaaggaagggttccagtttcagttttctgcatagggctagccaattctcccagcaccattcattaaatagggagtttgttcctcattgcttgtttttgtcagatttttcaaagatcagatggttgtagataagcagtcttatttctgagttctgcattctttttcattggtctatgtgtatgtttttataccagtaccaggatgttttggttactatagccttgtggtgtagtttgaagtcagatagcatgatgcttccagctttgttctttttgcttagaattttcttggctatatggggtcttttgggttccatatgaattttaaaatagttttttctaattctgtgaaagatgtcagtaatagtttagtgggataagcattgaattacttttggcagtatggccgtttttacaatattgattatttctatcttttccatttgtttgtgtcctctctgattttcttgagcagtggtttgtgttttccttaaagaggtccttcacttactttgttagctgtattcctaggtattttattctttttgtagcaattgtggatggaggttcgttcatgatatggctctctgcttgtttactgttaatgtattgaaatgcttgtaatttttgcacattgattttgtatcctgagactttgctgaagcttcttattagctgaagaagcttttgggctgacattggggcattctagatatgggatcatgtcatctgcaaacacagacagtttgacttcctatttgaataccccttatttatttttcttgcctgattttcctggccagaacttccaatactacgttgaataagagtggtgagagagggccttcttgttgtgccagttttcaaggggaatgcttccagcttttgccctttcggtatgatactggctgtgggttcatcataaatgactcttattattttgaggtatgttccataaatacctagtttattgagcatttttaacatgaaggtatgttgaatttaatcaaagaccttttctgcatctattgagataatcatatggattttgtttttagttctgtttatatgatgaattgtatttattgatttgtttatgttgaaatagccttgcatcccagggatgaagctgacttgatcgcggtggataagcttttcgatgtgctgctggatttggtttgccagtgttttattgagaatttttgcatcaatgtttatcagggatattggcttgaagtttcttgttgttgttatatctttgccagatcttggtatcagaatgatgctgatcttataaaatgagttagagtggagtccctctttttctatcatttggaatagtttcagaagaaatggtaccaactcctctttgtacctctggtagaattcagctgtaaatccatctgcctctgggcatttttagtttgtaggctatttattacttcctcaattccagaacttcttattggtctattcaggattcaaatttttcctggtttggtcttgggagggtgtttgtgtccagtaatttatctacttcttctagctttttcagtttatgtgcatacaggtgtttatagtattttctgatggtttgtatttctgtggggtcagtggtgatatcctctttatgattttgtattgtgtctatttcttcttctctcttttgttctccattactctagttagtgttctattttattaatgttttcaaaaaaaatagctcctggatttattggttttttgaagggttttttgtgtctctatctctttcagtttcacttggattcttcttatgtcttgtcttctgttagctttggggtttgtttgctcttgattctcttgttcttttaattgtaatgttagggtgtcattttgagatctttccagctttttgctgtggctatgtagtgctataaattttccccttaacactgctttagctgcattctacagattctagtacatagtctctttgttctcattggtttcaaagaatttcttggtttctgatttaattttattatttacccagaagtcattcaggagcaggttgttcaatttccatgtacttgtgtggttttgagtgagtttcttactcttgagttccaatttgattgcactgtggtctgagagactgttatgatttcagttcttttgcatttgctaaggagtattccttccaattatgtgatcaattttaaagtaagtgccatgtgacacttaggagaatgtgtattgtgttgtttttggctggagagttctgtagatatctatcaggtccatttgacccaaagctgagttcaagtcctgaatatctttgttacttttctgtctcaattgttggtctaatattggcagtagggtgttaaagtctcccactattattgtgtgggagtttgtttaagtccctttgtaggtctctaataatgtgttttataaatctgggtcctccttgaattgattcctttagcattatgtaatgcccttctttttctgttttgatctttgttggtttaaagtctattttgtcagaaactacaattgcaactcctccttttttcttcttttatttgcttggtgaattttcctccattccttcattttaagcatgtgtgtgtctttgcatgtgagatgggtttcttgaatatggcacaccaatgggtcttgactctttaatcagcttgacattctgtgtcttttaatgagggcatttagcccatttaaatttaagattaggccagccacggtggcttatgcctgtaatcccagcactttgggaggctgaggcaggtgaatcacctgaggtcaggagttcatgaccagcctggccaacatggtgaaaccccgcctctactaaaaatataaaaattagcctgtcatggtagtgctcatctgtaatcccagctgctcaggaagctgaggcagaattgcttgaacctgggaggcagatgttgcagttagtcaagattgtgcactgcactccagcctgggtgacagaacaagactccatctcaaaaaaaaaaaaaaaaaaagtttaaggttaatattgctatgtgtgaatttgattatgttttcatggtgctatctggttattttgaagactctttgatgtagttttttcatagtgtcattggtctttgtacttcagtgtgtttttgtagtggctagtaatggtttttttctttccatgtttagtgcttctttcaggagctcttgcaaggcaggcctggtggtgatgaattccttcagcgtttacttgtctgaaaatgattttattcctcctttacttatgaagcttagttttcctggatattcttggttggaaattcttttctttaagaatgttgagtagtggcccccaatctcttacggcttgtagggtttctgcttaaaggtctgttgtcagtctgatgaacttttgtctataggtgatgtggcgtttctctctggctgccttatcatttattcctgaatttcaatcttgaagaatctgattattatgtgtcttggggatgatcttctcatggagtatcttactggggttttctggattttctgaatttgaatgttggcctttcttgttaggttggaaaagttcttctggatgatatcctgaaggatgttttctaacttggttccattctccctatctatttaaggtaccccagtcagtcataggttcggtctttttacataatctcatagacctcagagatttctctcattcccgtttattcttttttcttcaatcttgtctgcctgttttatttcagcaagattgtcttcaagctctgaagttctttccttgcttcgtctactcagttattgatacttgtggttgcgttgtgaagttctgatgctgtgtttttcagttccatcaggtcatttatgttcctctctaaattggttgttttggttaacagctcctgtaatgtttttcatggttcttagcttctttgcattgggttagaacatactccattagctcagcaaagttcatcattacccaccttctgaagcctacttttgtcaatttatccaccttagccaccgcccagttctgtgcccttcctggagatatgctgggatcatttggaggaaaggaggcactctggctttttaagttttcagcattttttggtttattcttttcatctttgtgagtttttctagcttcgatctttgaggctgctgacctttggatgggatgcttgtgaggatttttttgttcatgctgtttttgttgttgctttctgtttgtttttctaaccatcaggccacttttctgtagcactgttgtgatttgcttgggatctacttcagaccctatttgcctgggtttctctcacacctggaggtgtcaaccagtggagcctgcagaatagcagagaggactgcttgctccttcctctggggtctttgtcccagaaggggaatgatctgatgacagtgggaacactactttataagttgtctgacgatgtctgttgtgggggtctcacccagtcaggatgcatgagatctgggaaccacttaagaaagcactctggctgcaccttggtggagtggctgtgctgcactgagggaaattccatacatctgtactgcctggattgctcagagccagcagggggaaagactaagtctgctgatctgcagaaaccacctcattgttcctgttttatgtatttcttgtagataagttttttctcatttcctgttttactacctttatttttgttaactttatcgttacatgctttgattattttttcattttttgcatactttttataaatattatgtaatcaccttgaagtataatgtaatcatcttaaaatggagattacataaaacatcttttttttttttttttttttttttttttttttagtatttattgatcattcctgggtgtttctcgcagagggggatttggcagggtcataggacaatagtggagggaaggtaagcagataaacaagtgaacaagggtctctggttttcctaggcagaggaccctgcggccttccgcagtgtttgtgtccctgggtacttgagattagggagtggtgatgactcttaacgagcatgctgccttcaagcatctgtttaacaaagcacatcttgcaccgcccttaatccatttaaccctgagtggacacagtacatgttttagagagcatggggttgggggtaaggttatagattaacagcatcccaaggcagaagaatttttcttagtacagaacaaaatggagtctcctatgtctacttctttctacacagacacagcaacaatctgatttctctatcttttccccacattccccccttttctattcgacaaaaccgccatcgtcatcatggcccgttctcaatgagctgttgggtacacctcccagacggggtggcggctgggcagaggggctcctcacttcccagaaggggcggccgggcagaggcgccccccacctcccggacggggcggctggccgggcgggtgctggccccaacctccctcctggacggggtggctggccgggcaggggctgccccccacctccctcccagatggggcataaaatatcttaaagttaaaaaaataaggccaagcatggtggctcacacctgtaatcccaacactttgggaggctgagatggatagatcacctgaggtcaggagtttgagaccagcctggccaacatggtgaaactgtctctactaaaaatacaaaaattaggtatgtggtggaggacatctgagactgaggcaggataatcacttgaacccagatgacagaggttgcagtgagccgagattgcgccactgcactccagcctgggtgacagagcaagactccatctcaaaaaaaaaaaaaaaaaaaaaaaagtaaaaaagatatattttaacttcttaaactttaattaaatacaaaacctatactgctatgttttccagtttgttattgatactacaaattatattatgtatctattaacagatttatatcttgtatttttatatctacagaactttaacggttttatgcaccattatgatagtaaaaaattctatatgtatctgtatatttatatttaatagggagctttatatatggttttatgatgctgtctagcatcattttatttttcaacaaaatggattcattttagcatttctatttgtttatatgcagagtctgtgtttctcagactggatcttggactcctggtctcaagagatctgactgccttggcttcctaaagctgtagaattacaggcatgagccactatgtctggccaccatgtaacatttcttgttacatttcgtgcaacatttcttgttacgtttcctgcaacatttcttgttacatttcgtgcaacatttcttgttacatttcgtgtaacatttcttgttacatttcgtgtaacatttcttatagtgaacaccctgaaatttaatttaggaaagtctgtatttttattttgtttttcaagtaaaataactttgaattaaatattattggttagaattttttattacatcaaaatttgggaagttctcagctttcgttttctttaatttacctctgtattactttttccctacattattcttctcttttttttttttgagacagagtctctctctgtcacccaggctggagtgcggtggctcgatctcagcctcagcctcccgagtagctgggaccacaggcgcccaccaccacacctggctaattttttgtattttttcagtagaggcagggtttcaccgtcttagccaggacggtctcgatctcctgactgtgtgatccgcctgcctcggcctcccaaagtgctgggattacaggcatgagccactgtgcccagcccccctatattcttctaagatttatttcatgaatatattgatggacttgatggtgtccaataagttttacattccatatttttcttttgttttgcaattttatatttttatgttatatattttagggtatgccacctcataccaattaactgtgttttgatgttttagtttatattgtaattgtgtatgacaatgtttaactctgtacaatttaaggcagtttggagcaaaatcaaatataaatcagccatatgtctattgccaatataattatctctttttccctgtataaatattctctctgtattttttatgacttgtatatttgttatgtaggtttgttgtgagtggttgttcaatcttgtctaggtgagcagtcatctcctaatttcaatatctattgtgaatctatattatttttgtgtggaagaaacactcttggatttgaagattatatacaaactatcataactttgtgtcttttttaggtattattgtttatttttacttgtcagaaccacataacaaaatttattatcaaacattttaaaatatgctgtttaggccaggtgcagtggctcatgcctgtaatcccagctctttgggaggacaaggtgggaggattgcccgaggtcaggagttcaagaccagtctggctatcttggtgaaaccctgtctctactaaaaatacaaaaactacccgggtgtggtggcgagtgcctgtagtcctagctactcgggaggctgaggcaggagaatcacttgaacccgggaggtagaggttgcagtgagctgagatcatgccacctcactccagcctgggcaacagagcaagattccgtctgaaaaaaataaaatatgctgtttagtcatattaattatatgacaatgttatgcaacatatccctataatatttatatgttgcaaagctaaatctcaatacacattaaacaagaaccaatttttctgactttctggcactttgcaagcaccactctgttttctctttctaagagtgtaactgtttcatgtatcttctacagtctctttttgtggctggctcatttcattttgcataatatcatcaagctttatctttataattgttagaatatttttggctttttaagtcctaggtgatattccagtatttttatattttaaattatatctactgaataatttggtgacagaaatttgcattccttttacctactggctttcagtagcaatgctgcaataattatggatatgcaaataacttcatatggccatatatgtgaacatttatatatgtgctaacttctattttattagttcactttgttttgagacagtctcactttgtcacccgggctggagtgcagtggtgcgatctcggcgcactgcaacctccacctcccgggttcaagtgattctcctgcctcagcctcttgagcagctgggactacaggctcgtaccaccaagcccagctaatttgtttatttttagtagagatggggttttatgttggcctggatggtctcgatctcttgacctcatgatccgcccaccttggccccccaaagtgctggaattataggcgtgagccactgcacccagcctattagtccactttttagccattatactcataccaaattgtttttattctgtaactttgtaatgtattttgaaatcaggaactataatgacttcaacattgttcctttttttgaatactttgggtactttattgtcttttgagagtccatatgctacttttggagttgctgtttctgtttcctcaaaaatgcaatgagaaattaaaaaaaaaattgcattaaatctctgtattacattgagcagtatggacgtcttcaaaatattaattatttcaacctttgaacaggagcatgctggagaatgtgtttaatatctatatagttataaatttttcagtttttgtctgttttatactcatttcattttggtcatagaatgtaattcataaattgtttttaaaaacttaaaaattaaaaaaatttgttaagacttctttttttgcctaccaggtggtctatcaaggagaatgttgtatgagctactgagaagggcatgcatcctgatattgttgaggtgtcttctctatacctctgttagaaatagttgttttatactgccttcaagtcctctctttacttactaatattctgtcttgtgttatttttattacagaaagttgggtattgaaatgtcctaccataattatattactgtctaagtgttttttccattctttcaatatttgctttatatgtttggagacttaatgtaagatacaaacacacacacacacatatatatacataggttcccagtaaatgaatgtattattgtttaatgtctttgtctctttgcagttttgacctaaagtacattttataaactatgacagtttttgacttaagatgtagcttgtgtaatattattttggtctcttctgctctcatttggttaatatttgcatggaatgtctaaatccatcttgccactttcaatccttttttgtcattagattttagctgagtcttgtagaaaggcaagttgcatcttggtgtgagaaacaaactcacctatccaaacccaaagaatggactcagggacctggagaacagcgaaagtgagacttttaatgacggtcttgcaagattgagtgtctggcatacaggcacacgcagcacagtttcaacaaacaattatctcttagtgcacaggtccctccccctggttcctcataggctgactactattgggtcacagtcttcccagatgtcacctattggcaagggctttaggtgtttcttttacgagttgtcttgttgcattttgttgcagcccaaaatgcatcgcgactgttcaggactcttcagacatttgatttgtggccctagtggctgcacttagctgataagaaagggtacaattatctatgttgcaaactaacctaaattttttggtggggtggagggggtgtggttgcggggaccctgacctataggcgcctggctactgggtaaaagagaaggcaggaaggaggggggtgatgactcagtacactctgcttctttatgtctttatttccatgtaacctgcttaaaactaacgcacttagaattgagaatggaccatcacatataggttattttctacattggtttttttatttttatttatttatttattttgatacaaagtctcactatgtcgcccaggctggagtgcaatggcatgatcttggctcgctgaaacttccgccttccaggttcaagtgattctcctgcctcagcctcccgagtagctgggattacaggcaggtaccaccacactgagctaatttttgtatttttgctagagatgagatttcaccatgttggccaggctggtctcaaactcctgacctcaggcgatccgcccatcttggcctctgaaagtgctgggattacaggcgtgagccactgcgcccagccaaaaatttttttaataaatcactttattgaactcatgtcacttgagtggaaagttagttatatatatgtatgtgtatatatataaactctgaaacagaaagacattaatgttattttattgttgtatttgattcttgtatctttgtctctcattttctctcttaatttgtgtcttttttgtttttatgttgatatacttttacttctttcttattttgtttgtgtatctatacaaatatattatttgtgctatcttggggattacataaaacctctaaaagatacaacgatatatttcagtctggtaaaaagaaaaaaacttcagttacatgcaaatattttttctcattacatctgccctcaaatttttcattgatgtttgaattatattttttatgttgtatattaactaacagatgtttataatgatttctatgcttttaactttcaaattttagaaaataattaaaaatgttttctgcaccattataataatgcttaaaaattcaatttttgtgtttgtgcatatcttttccagaaaataatgtatttttctatgatgatgtgttgtttcattgaataatgttattttcagtagaagcaactgcttttagcatctttttatatgtagagcatacggagtaccaatgcactttttcagaatttggttattttttaaggttttttttttttatttagcaggacatatttgctgatggtattatactcacttgatagctatttttttcaggactttgactatatcagacagtacccttctggcctgcaaaatttttgttgacaatttactggctgtgtcataagactatgcttgcaaatgacatcacttttatcttgcagtttccaagaggctgtttttgtctgtgacttttgaaattgtgcttatatatgtgtttgttataaatatctttgtgtgtatcctagtttgttttttgagcttcttcatttttacgtcttttttttttttttttttttttttgagacggagtctcgctctgtcgcccaggctggagtgcagtggcgcatctccgctcactataagctccgcctccccggttcacgccattctcctgcctcagcctcctgcgtagctgggactacaggcgcccgccaccacgcccggctgattttttctttttttagtagagacaaggtttcgccgtattagccaggatggtctcaatctcctgacctcgtgatgcacctgtctcagcctcccaaagtgctggtattacaggcgtgagccaccgcgcccggccgtcattttttctttcaggatttttcagttagtctttttggtattttttgccttcataatttctgtttttctggtattttacatatttttgttcttaccctcatttttctgattttctgtagttctctatgtttctgtgtcactcactgagtattattcaatttgttttcaatttttaaaattaatatatacattttttatggtttctctctgaaacttttatatttttgataaaaccatattgccttattttgtatacattgtaatctttgattgaaatttgtacatttaaaaaagctacctgtcacaatccttataatgtagctttgtcctggcatagtctggacaattgtcttgattagagatactgggagtctctcaaacatgttgctagaatgtgtcttgtctacaattttgtgtttattttttaattaaaagagtttgtgtttcttctttttttagtttttttttttgtttgttttttgtttttttgtcagacggggtcttgctctgtctcccagactggagtgcagtggcgcaatctcggctcactgcaccctccgccacctgggttcaagtgattctcctgcctcagcctcccaagtagctgggaatacaggtgtacgctatcacacctggctaacttttcttttgtttttttagtagagatggagtttcaccatgttggccaggctggtctcaaacttgtgacctcaagtgatccgccagccttggcctcccaaagtactggaattacaggcatgaaccaccacaactggcctttttttgtttcttcttaatagtaataacttgctacacctgttttctgtgtgtggcactgcagtctctctgctgctgtaacatttagctttggtctcagcagacttaaactgtcattccaaagtataccaccatttctttcagcactagatgtcataggagacagaaaccagtgtatagataggtccctagaagcaagtaataaagatgtatgtggcagtattttaattgtcttttaaaaaagaaaccaaaagttggcagtggggagcaggaagagctgtgttgggtaaatttaacagacttttctttttcttctgtgtcactctctatgttgtgctcagctggggcacttcacacacttaacttatttataaattttcctcagatgtatttttgttggatgtttttgttacatttacatgtctgtaaaaaattagggcctttgggccaggcgcggtggctggtgtgccaaagtgcggtaatcccagcactttgggaggctgaagtggacgcatcatctgaggtcaggagttcgagaccagactggccaacatggcgaaaccccatctctactaaaaatacaaaaattagctgtgcgtggtggtgcgtgcctgtaatcccagctactttggaggctggggcaggagaatagcttgagcctgggtggcggaggtggcagtgagcagagatcacgccattgcactccatcctgggctacagaatgagactctgtctaaaaaaaaaaaaaaattagggcctttattattttgctatgccatcttgtttatgtagtttgtataattatatgggttagatttgtaaagcatattcatctgagtctagtaaatggagtaatttgttatttttatttctttcagttacatattctcattttgcccaagacctttggccagagcagggcataaaagattctttccaagaagtcatattgagaagatatggaaaatgtggacatgaagatttacagttaagaacaggctgtaaaagtgtggatgagtgtaatctgcacaaagaatgttatgatgaactaaaccagtgtttgacaactacccagagtgaaatatttcaatatgataaatatgtgaatgtcttttataaattttcaaatccaaatatacaaaagataagacatactggaaagaagcctttcaaatgtaaaaaatgtgacaaatcgttttgcatgcttttacacctaactcaacataaaagaattcatattagggaaaattcttaccaatgtgaagaatgtggtaaagtctttaactggttctcaacccttactagacacagaagaattcatactggagagaaaccctacaaatgtgaacaatgtggcaaagcttttaagcagtcctcaacccttactacacataagataattcatactggagagaaaccctacagatgtgaagaatgtggcaaaacctttaaccggtcctcacaccttactacacataaaagaattcatactggagagaaaccctacagatgtgaagaatgtggcagagcttttaaccggtcctcacaccttactacacataagattattcatactggagagaaaccctacaaatgtgaagaatgtggcaaagcttttaaccaatcctcaacccttactacacataagataattcatgctggagagaaaccttacaaatgtgaagaatgtggcaaagctttttaccgattctcataccttactaaacataagataattcatactggagagaaattctacaaatgtgaagaatgtggcaaaggctttaattggtcctcgacccttactaaacataaaagaattcatactggagagaaaccctacaaatgtgaacaatgtggcaaagcttttaatgagtcctcaaaccttactgcacataagataattcatactggagagaaaccctacaaatgtgaagaatgtggcaaagcctttaaccggtccccaaaacttactgcacataaggtaattcattctggagagaaaccctacaaatgtgaagaatgtggcaaagcttttaaccaattctcaaaccttactaaacataagataactcatattggagatacatcttacaaatacctagaatgtgataaagcctttagccagtcttcaactcttactaaacataaggtaattcatactggagagaaaccctacaactgtgaagaatacggcaaagctttcaaccagtcctcaaaccttattgaacaaagtaattcatactggagagaaaccctacaaatgtgaagattgtggcaaagcctctaacccgtcctgaattcttactaaacataagaacattcatactgaagaggaaccctatgagtgtgaagaatatggcaaagccttcaacaagtcctcaattcttaccagacataagataattctggctgggtgcggtggctcacacctgtaatcccagcactttgggaggctgagacgggtgaattacatgaggttgggagttcgagaccagcctgaccaacatggtgaaatcctgtctctactaaaaatacaaaattagccatgcgtagtggtgcatgcctgtaatcccagctactcgggaggctgaggcaggagaattgcttgaacccgggaggcagaggttgaagtgagctgagatcgcgccattgcactccagcctgggcaacaagagtggcactccatctcagaaaaaaaaaaaaaagataattcatactgaaaagaaactctacaaacttgaaagatgtgacagtgcttttgacaacacctaaaacttttaaacataaaaaatcatactggtgagaaatcctagaaatgtaaagaatgtgacaaggcctttaaatggttgtcacacttcattataggtaagatagttcatactgaagaaaacttctacaagtgtgaacagtgtggcaaaacttttaatgaatgctcacaccttattgcacaggagagcatttatacttgaaaaaaattgtacaaatataaagaccatgaaaaagccattaatatctattcacatcttaccactggagagttcatacttaataaaaggaatataagtgcaattactgtcaaaagatctttcagaaaatataaacctttaaagcgaagaaggtatttattttgaagatgaacactacaaatgtgaagagggttgtagtacctttatttgtatcacagattttattgtacacattttgtactagaagaaaactctgaagtagttgctcaaactttgttcaacatcagggaatttatattgaagaaaaactttgcaaatttaataaattttaaaaaacactttttcaaaaagtacagcttagaagacaccagagttcatactaaaatatatttttgcagatgcagtaaaaatgaaaatatttaatccaaaattaagtctatgtaaatatcagagaatttactgtagaaatatataaggcactgagacttcagatattatactaaatcagagtgctgagtatagaaaataaaactgaagttggggccaggtgcagtggctcacacctgtaatccagcactttgggaggccgagaagggtggatcacctgaggtcaggagtttgagaccagcctgactaacatggagaaaacacggctctactaaaaatacaaaattagccagctgtggtggtgtatgcctgtaatcacagctactcgagaggctgaggcaggagaattgcttgaacccgggaggtggagagtgcagtgaactgaaattgcgccattgcactccagcctgggcaacaagagtgaaactccatttcaaaaaaaaaaaaaaaaaaacaactaaagttggtagaaaaattatttgtatataactttaaaaggagtagaagggctttttgcagagttattacgtttgaagtatactttatttcttgaaaaaattacagattttttgtaaataatgatgtaattcaactctcaaaatatttcctactgtttctttattccagttgtattcacatgtgaaagcatgtgatcagttattgctgcattaaaaacatgagtcttttttattaggtggccattatttatgatcttttctatgaaagagtaaggacattaaaatgtaagatgcatgatgaaaaattaagtgaagaggctctttatggttaatttatattgaataatgcattaggtaggtgttcagagtaatattttgcgttgtgagaacatttttaattttatttaaaattaaatgaaaataaattagtatattattgtactaattgtacttttgtataataaaatccagtgtattttaaaaatgttaggttatgtgtggttaatattttaatccaatatttttaacatgttaaatactattgtgcattcaatgaagtgttattatgccacgaactttaacctgttccactttacttaaaggtatagatgaaagataataacaataaggggccaggcgtagtggttcacacctgtaatcctagcacttcgggaggctgaggtggatgaatcacgaggtcaggagttcaagaccagcctggccaacgtggtgaaaccccgtctctactaaaaatacaaaaattagccagttgtggtggctggcgcctgcaatcccagctacttgggaggctgaggcagaagaatcgcttaaaaccagaaggtggaggttgcagtgagccaagatcgcggcactgcacctgggtgaaagagtgaaactctgtttcaaaaaaaaaaaaaaagatggtaacaatatactatttggcaacatagtggattaacatcttgagtaatctcttttgtcagtgggtttaaactgcaaattagttaaagaatattgcttctgtaggttaaatttttctttttcaattatttaaatttatttttaaaatttttgtgggtacataatatgagtatatatttatgccatatatggcatattttgatacaggagtaccatatataataatcacatcagggcaaatggggtatccatcacttctagcaataatttatcctttgtattacaaacaattcagttctacacttttagttattttaaaatgtacaattgttatcggttacagggttatttttatggtcataataaaaaatatgcaagtataaataaaatccatacatttctgagtcctgaataaatattattaaaattttcttacatatatttttgaacatgtggcctgtctgcctacaaacacatacaaacttttagttttgatttacatagagttaaatatatattagtctaaagataaatcttagttgtaagaaaactatggaatatgagtttgtccctactttcagaaaaaaaaagagcaatataggaacaaaacaagtcattttaacaaggtgactactagaaaactaaaaacctcaaaaatgcaaaagcaaacatatactctctgctttgtattgaatttattactgtataatctatgccttatacttcggaatctccccatgcaaattctgtttatacttgcctggtactcatgatagacccctactttttggtattttgtatatttattttatagtttatgaaatattcattatgtgagctggaatgtgagtataagaataatttttatgaaatgtgcatacaaaataattttatatgtaattccacaattagtatattaagttacattttatttagctagaacactccattttgttttcaattggagaaccctatataagcttactattctttagttattgttctttttactttttataattgacaaagtaaatttatttatggagtcaaattgttcaggtaaatacaagggaagcttagtaagtcatgaagatgtttttacatgtaaatgtggaaagcatatatagcagttcttggtgtgtaacatgctccagaaaaagccataaacatttctgctaaagttagtttgtaacttcaagtcagagatagaaaatattagtagtgaagaaatacagctgatgttttatgtggagaggacacttccaggctgcaaagctgagtgttgctgaattaaaaaaaaaaaaaaaaaaaaaaaatgtggcctggcacggtggctcacacctacaatcccagcactttgggaggccaagacaagtcgatcatgaagtcaggagttcaagaccagcctggccaagatggtgaaaccccgtctctactaaaaatacaaaaattacctgggcatggtggcaggtgcctgtaatcccagctacttgggaggctgaggcagagaatcccttgaacctgggaggcggaggttgcagtgagctgagatcacaccactgtactccagcctgggcaacagagcgagactccgcctcaaaaaaaaaaaaatgctagctgggtgcggtggctcacgcctgtaatcccagcactttgggaggctgaggtgggcagaccacaaggtcaggagatcaagaccatcctggctaacacggtgaaaccccgtctctactaaaaatacaaaaaattaactaggcgtggtggcaggcgcctgtagtcccagctactcgggaggctaaggcaggagaatggcatgaacccgggaggcggagcttgcagtgagccgagatcacaccactgcactccagcctgggcgacacagcaagactccgtctgaaaaaaaaaaaaatgctgcttttattttcttcagatttgtttgtattatgtgtattctagctatgtatgcatcacagcccttatttttctatgttatggctacagttttctctttgttgtcttcatgccatttcatttcacatggtactttgtagattttgatgagaaacttcataatttttaatgccctgaaaaaatgtttttgttttctatttctttaagatggagtttcactcttgctgccaaggctggagtgcaatggtgcgatctcggctcactgcaacctctgcctcctgggttcaagtgattctcctgcctcagcctcccaagtagctgggattacaggtatgcgccaccacgtccagctagtttggtagttttagtggagatggggtttcaccttgttggtgaggctggtcttgaactcctgacctcaggtgatccacacacctaggcctcccaaagtgctgggattacagatgtgagccacagcaccaagcatgaaaaattgggtttaactggagagtttgcttatcaatataactttcagatcagtgaattaagataaaggcatacactgtccacaggtgagagaattaaatcagttgcatgggttttgtttgtttgtaaaagaaaaagcttattacattgttatacaaagtgtggcaaataaaaaatttgctagaaaatataccttaaaaattatttatttatttatttatttatttattttgagaaagagtctcactctgttgcccaggctggagtgcagtggcgcgatcgcagttcactgcaacctccacctcccgggttcaagcgattctcctgcctcagtctcctgagtagttgggattacaggtgcgcaccaccacgcccagctaatttttgtattttaagtagagacaggttttcaccatgttggccaggctggtctcgaactcctgacctcgtgatccacccaccttggcctcccatagtgctgggattacaaacactgcacggagactttattttttattttattttattttattttattttgagatggagttttgcttctgttgcccaggctggagggcaatagcacgatctcggctcaccacaacctccacctcccaagttcaagcgattctcctgcctcagccttcccgagtagctgggattacaggcatgccccaccacaccctgctaatcttatatttttagtagagatggggtttctccatgttggtcaggccggtctcgaactctcaacctcaggtcatccaccctcctcggcctcccaaaatgctgggattacaggcatgagccactgcatctggcaaaaattaaatttttaaaagagttaatggtaagtgaacaattttatattgaattctctgtgatataacacaacttatgtttccatgcagaatcttctaagcgtaaatgttaaaggttgcaaaataataaaatgacctctgtgaatttgcaatttggaagaattttttttccatattgatattgaaatttggaggaatttctctcattttgtataatttttttagtgggtgaagttcagtcttcagtttttatttttagtcacctaactatagccaactcctcagtcattttctctggataacttttggagatcctgacagttttgggattaaaacatttactgttagtttgcatgtaaactagttatactgtgttcacagagtggccagttatgggaccataggcaacaactgcccccttagtgtctttcataccattaccatcatcaccagaaactccaggtgccccaagcttaaagcaaaaatcctgaagtacatcagctcctcccttgcaacgtgctgggtttggaacatgctgttaaaatatcagagttcctggccagacatggtggctcatgcctgtaatcctagcaccttgggaggctgaggcgggcagatcacgaggtcaggagctcgagatagcctggccaatgtagtgaaaccccgtctctactaaaaatacaaaaacattaggcagtgtggtagcacacacttgtaatcccagctactcctgaggctgaggcaggagaatcgcttgaacctgggaggtgaaggttgcagtgagctgagatggagccactgcactccagcctgggcaacagggggagacttccgacctcaggtaatccacctgcctcggcctctcaaagtgctgggattacaggcgtaagccacagtgcccggccttgaactgttgattctatattttgtcttttatgaagagtgctgcaaacaacatagaagtgcaaatgttcttcattaggcattatctgtttcggacacatatccaatggtgcaattgctatgttacatggtagtttgattttaagttttttgagaaacctctatttcatttttcataatagctgtcttcatttacattcaaaccaacagtatgcaagtattcccttttcttcacgtctttaccagcactttattctttttctttttaataagagtcatattataggagtgagttgatatctcatagtgttttttggcttgcctttccctgatcataattgacaatgagcatttttaaatatttctgttggccatatgtatgtcttttcttgaaaaagacttatttaaggcttttgcttattttaagttatttcttttttgttgtagtcatttgagtttcttatatatttttaatattaactccttgtcacatgtatgatttgcaaatactttctctcattaattagttgtctcatcctgttgattgtaccacattctgtgcagcagctttataatttgaagtaatctgactaatctattttttcttctattccctgggattttgaggttaaataaactctctgcccaggacaatgtgatggggatttcactctattttttagtaatagtttcaggccttacatttaagtatctaatttattttcgttgattttttaatatggtgtgagataagggtctcattttactgtgctgcctgtggatatagttttctcaacaacatttattgaagatactgttctttccttaagaaatcatcacctttatttaaaatcagctagctgtaaatacacagatgtatttctggtctctttctgctcaattggcctatatgtctgtttttattcagtaccatactgttttagttactatagctttgtggtatatttcagtcaagtagagggatatcttcactttttttttttaattgctttggctatttggatcttttgtggtaccatatgaattttagatatacatttttaaacttcttttttttttttttgagacaaagtctcactctgttgcccaagctggagtgcagtggtgtgatctcggctcactgccacctctgcttcctgggttcaagtgattctcctgcctcagcctcctgagtagctgggattacaggcccaacatgtgcgcaccatcacgcccaactaagttttgtatttttagtacagatggggtttcacgatgttggtcagactggtctcaaactccttacctcaagatctacccacctcagcctcccaaagtgctgagattacaggcatgagccgccatgcccagcctactttttaaaatttctatgaagtatgtcactggtattttgatagaggttgcattatatccatagatcattttgtgtaatacagatacttaattactaataatgccaattcatgaatgaatattattttatgtgtatattacttaatttgtttaatgttctttagagtataatgcaagatgtttcaactttttggttatatttatttcaaagcatagttactaaagttagatggaattgttttttaatttcgagatagttattgtatagaaatgctgcttacttttggatgtagcttatttattctgaaagtctaataactttgtttattagttctaatagttttttgtaaagtcttaggcttttctatacttcagatgttgtatagaaataaaagattattatacagggataatttacattccttttttccaatctggatacttttgattttactctctaatttctttgtcttggatatttagtactatgtttagtaagactgactagagtgggcatccttgtcttgttctagctcttagagtgaaagcttgcaacatatccctgtttagcatgttattagctgtgcattttttggttatatgtggcatttattggctgaggtgcatttgttccatacctgtttttttcagagattcatcataagggagtgtcaacttttgtcaaacttttcttctgcatctatttctttctttttgtgctttgcatctatttaaatgttagatttgtgaaatcacaataaatcctacatagacaggaaaaatcctcagagactactatgaacatctctatgcctgcaaactagaaaattaggagaaaatagataaaatcctggatacacaaacttccaagattgagccaggaagaaacagaagccttgaacaaagcaaaaatatataaaatagataatgaaattgaattagtaataaaaaacctaccaagtgtgattcaacatgtaaagataataaaaccaaaaaatgatacgattaacacaatagatgcaaaaaaaagcattcaagaaagttcaacattcatgaaaatattctccacaaagtgggcattgatgaaacatacctcaaaataataagccatctatgacaaatcctcagctaacattatacttaagcaaaagctggatgcattctccattagaataaaaataagacaagaatatcaactttatcccttctattcaacatagttctggaagtcctagtcagagcaattcaacaaaataaagaaataaaaggcatctaaagcctggcgcagtggctcatgcctgtaatcccagccctttgggaggccgaggcgggaggatcacctgaggtcaggagttcgagaccagcctgaccaacatggagaaaccccatctctactaaaaatacaaaatttgctgggagtggtggcacgtgcctataatcccagctactcgggaggctaagacaggagaatcacttgaacccgggaggtggaggttccgatgaaccgagatcatgccattgcactccagcctgggcaacatgaacgaaactccatcccccccaccccactccccccaaaaaactcatctaaatagaaagagaggaagtcaaataatcttcactgattatataattctctacctagaaaacaaaagattttgggccaggtgcagtggtttacgcctgtaataccacactttgggaggccgaggcgggtagatcacttgtggtcaggggttcaaaaccaccctggccaacatggctaaaccccatctctactaaaaatacaaaagtagctgggtgtggtggcgcatgcctgtaatcccagctacttgggaggctgaggcaggagaatcattcgaacctgggaggcagaggttgcagtgagctggaatcacaccgttgcactccagccactccagcctgggtaacaagaacgaaattccgtctaaaaaaaaaaagttcaccaaaagactccaaagcttaatgaatgactttagcaaagtatcaggatacaaaattaatatacacaagtcacatttttgtataccaataacattcaaaatcaagaacagttttattttatttatttatttttgagatggagtttcactcttgttgcccaggctgaagtgcaatggtgtgatctctgctcactgcaacctccgcttgccgggttcaagcaattctcctgcctcagtctcccaagtagctgggattacaggcgcgcaccaccatgcccggctaattttttgtatttttagtagagacggggtttcaccatggccaggctggtcttgaacttcctgacctcaggtgagccgcccgcctcggcctcccagagtgctgggattacaggcatgagccaccgtgcccggccaagaagagttttattttgaataaccacagacaaaaaataatatacctacatatacactaaatcaaagaggtaaaatatctctacaagaagtacaaaacactactggaagaaataagagacaatgcaaataaataaaaaagcattatatgctcatggatttgaagaatgaatgtaattaaaatgtctatgctgcctaaagcagcctacagactaagtggtatttctatgaaactatcaatgacattttttatagaattaaaaaaagaaggccaggcgcagtggctcacacctgtaatcccagcattttgggaggccaaggcgggcggatcccaaggttcaagagatcgagaccattctggccaacatggtgaaaccctgtctctactgaaaatacaaaaattaccctggcgtggttgagcacgcctgtagttccggctactcagaagactgaggcaggagaatcgcttgaacccaggaggcgaaggttgcagtgagccgagattgtgccactgcactccagcctggcgacagaaccagactctgtctcaaaaaaaaaaaaaaaaaaaaaaaagccgggtgcggtggctcacgcctttactcagcactttgggaggccgaggcaggcggatcacaaggtcaggatatcgagaccatcctggctaacacagtgaaaccccatctctactaaaaatacaaaaaattagccgggcatggtggcatgcgcctgtagtcccagctactcgggacgctgaggcaggagaatcgcttgaacctgggaggcggaagttgcagtgaaccaagattgcgccactgcactacagcctgggtgacagagtgagactccgtctcagaaaaacaaaaacaaacaaacaaaacaaaaaagctattctaaaatctatatggaataataaaagaaccctaatagccacggcaactttatacaaaatgaataaacctggaggcctcccattaactgactttaaactactacgagttacagtaaccggtgtaacatggttcaggtacaaaaatatacatatagaccaatataacagaagaaagagccctgaaataaagctacacttttacacccaacttatttttgacaaagtcaacagaaataaaggggaaataactccctgtttaattaattgtactgggaagactggttagtaatatgcagaagaaaactggacgcctacctcttcccatataaaaaatgtaactaaagacatattaaagacttatctgtgagtcttcaagctacaaaaattcaagaacacctagaaagtactcttctagacactggcgtctgaaaaaaaaaaaaaaaaaaaacttaaaactaataaaagtgagtgcaacaaacataaaaatcagaaattggcatctaattaaactaaagagcttctgcaaagcaatagaaactatcaacgaagtggacaagctacaatatggaataaaatattcgcaaactgcatacaatgaaagattaatatatagaatctataagaaatagccaggagcagtggctcacgcctgtaatcctagcactttgggaggctgaggcaggtggatcacctcaggtcaggagttcgagaccaacctggccaacgtggtgaaaccccatctctactaaaaaaaaaatacaaaaattagccgggcatggtgacgcatgcctgtaatcccagctactcgggaggctgaggcaggagaatcatttgaaccccgggagatggaggttgcagtgagccaagatcgtgccacagcactccagcctaggcgacaagagtgaaactccgtttcaaaaaaaaaaaagaaaaagaaaaaaatttaataagaaaaagggcggcgaatgatatgaatatgcatttcccaaaggaagacgtgagagctgccaataaacatgcaaaaattgctcaacatccctaatcatcagagagatgtaaatcaaagtgacaatgtgataccatttcccagcagttagaatggctgttattaaaatgtcaaaaattggctgggtgcggtgtctcatgcccgtaatctcagcactttgggaggccgaggcggctggatcacctgaggtcaggagttggagaccagcatggacaacatggcaaaagccagtctctaataaaaatacaaaaattagccagcgtggtggtgggcatctgcagtcccagctacttgggaggctgaggcaaaagaattgcttgaacctgggaggcggaggttgcagtgagctgagatcgcaccactgcactccagcctgggtgatagagtgagactctgtctcaaaaacataataataaaaaatttaaaaattgaaaatgttgaagttgtgaagaaaagggaatctttatacactgttggtaaaaatgcaaattaatttagcctctttaaaaagcagtttggagatttcttaaaaaactaaaaattgagctgccatttgacccatacacctcattactgggtatctacccaaaggagaataaattatttttctaaaaagacatctgcggtcagccaggtgcgctggctcacacctgtaatcccagcactttgggaggccgaggcgggtggatcacgaggtcagcagtaagagaccagcctggccaacatggagaaacctcgtctctactaaaaatacaaaaattagccaggtgtggtggcaggtgccagtaatcccagctactcaggaggctgaggcaggagaactgcttgaacctgagaggcggaggttgcagtgagccaacaccacaccattgcactccagcctgggtgacagagcgagattctgtctcaaaaaaaaagacacctgcaatcagatgtttattgcatcactattcacaatagcaaagacaccgaagtaaaccaggtactcatgaaacttagattgaataaagaaaatgaggtccttatacaccttgcaatactatgcagccacattaaaaaaatgaagtaatgtcctctgcagcagcatgaatgcaacaaatggccattattataagcaaattaacacagatcaggaaaacaaatactacatgttctcacttacatgtgagaggtaaacattggatgcacatggaaacaaagataggaacaataaacactgggaattccaaaaagaagaaagaaggaagggaaaacaagccctgaaaaactacgtatctacaaaattagccgggcgtggtggcacatgcctgtaatcccagctattcaagaagctgaggcaggagaatcgcttgaacccgggaggtggaggttgcggtgagccgagatcgtgccattgcactccagcctgggcaacaagagcaaaactccatctcaataaaaaaaaaaaaagaaagaaaaactacgtatcaggtataatgtacatatgtacataacttgggcaatgggattattaagtgcccaaatgtcggcatcatgcagtatacctatgtgacaaatctgcacgcataccctcaaatgtaaaataaaaagaataaaatgctttgggctataacaacatcacatttttctagctcttggttaatagctgaaattaggggtgaaagacaaggaattatatcccctttgggcatggggtgaatgtttctattccaggtcaccccaaattttatgagctaacatctataaaagctcttggcctatagcccaaggttttcttctcaagtatgcagttaaaataaatgactctacatctttattttttattaactgtacgttagactatagagttaatttgtcactctgctctttggggaataaatattagtatacaacctgtattactttaataaagaaattatttctttagttttgattcttcaggatgattcaattccctggtgagagaataacttacttattaaggtaatagatgtagggaagactcattactcttgaccaacatctcccccaccaccagccccaggcaatcatcattctacactttgcttttattagtttgaattttttaatattctacatagaaatgagataatgtagccaggcatggtggctcatgtctataatcccagttacttgggaggctgaggctggagaatcgctttaaccctgggaggcagacattgcagtgagctgagatggggccactgcactcctgcctgggtgacagagagagactccatctcaaaaaaaaaaaaaaaaagaaagaaagaaaacaaaacaaaaaactacaactacataaacaacaaggcacttaacatgatcttcagaatttgtgggggccccacagatgtaacttcctgttgggggtctgggtgcagctagttgttgtaagtttctgtgctgcccatcatcctcatggaaactgaagctgggatggaaatttaaagggtaagatgaaacatgatgacagcaagaaagctgaagctcttaataatgaatattttttaaaataataatgccataaaatagtaaggtggctaaattacttgctgtaaacaaactcacaatttgaaaataaaattaattttttgcccatttcaagatagttgaacaggagtttctgaatgtatctgcttgctaggtctagttggcatattaaagccgacaattttttttttttttttttttttttttgaggcagagtcttgctctgtcacccaggctaaagtgcagtggtgagatcttggctcaccgcagcatccatctcccagattcaagtgattatcgtgcctcagcctcccgagtatctgggattacagacgtgtgccaccatgcctggctaatttttgtatttttagtagagatgaggttccaccatgttggtgaggctggtctggaacacctggcctcatgtaatccacctgcctcggtctcccaaagttctgggattacaggcgtaagccattgtgcccggccaaagccaacaattcttattgagaactttctacttctgccattaactgtcattttatgctttatatgttgggatttttgttaggtacaaatatatttacaactatcatattatcttgatagatttacaattttttcaatataacatgttgtcatttgccagttaattacaacacttttgtcttaacaccttctttttctaagtgtagccaccccagctctcttttggttactatctgtatgaaatcttttcatctaacctttcattgtaaaactatttgtgagtttagaactaaagagagtctcttgtagataacataaatttctcgaatccgggcgcagtggctcatgactgttatcttagtactttgggaggctgaggtgggcagattacctgaggtcaggagttcaagaccagcctggccaagatgacgaaacctcgtctctactaaaaatacaaaaattagccaggtatggttgcaggtgcctgtagtcccagctttactcaggaggctgaggcaggagaatcgcttgaacccagaaggtgaaggttgcagtgagccaagatcataccacttcactccagcctgggtgacagagcaagactccatctcaaaaaatataaaataattttaaaaaaacataaatttctcttcaatttattttatagtccctctctctattaatattttctatttgcagcatatttaggataggtaatttagactttttctaggctttctaatgcctaggcttcctctaagactttttctgttcatatctgttacttattcataggccatgttttcttatttctttgcatgccttgtatcttgttgctgaaaactggacattgttctactataatataaaaaccataaaatcttacgtactcttatcctttgggtttttgttcctgcttattttaacttgtacttttgtgcttagttttcaaaattattattaatattattattattattattattatttgagatggagtcttgctctgtcactcaggctggagtgcagtggtacgatctcggctcactgcaacctctgcctcttgggttcaagcaattccctgcctcaggctcccgaatagctgggattacaggcatctgccaccacaactggctaatttttgtatttttagtagagacggggtttcatcatcttggccaggctggtcttgaactcctgacctcgtgattcacctgcctcagtctcccaaagtgctgggattaccggctaaaagttattttttttaaatactgttttttgttgtgtttggcaataaaaatctgtttctttagcttaatgcgaactagtgatttgaaagagatttacctcaaatgcctgctcacctcaaatgtacatttcctaattcttgcagctgggtttacacagctaggaagattacaactttgccaccttcttctcttcttgcatgtttagagattgagggtaaagcagagatgagagagaacatcttcttaggtctttctgagcatttgcctggcctttgactgaccctgaacatgcttatgagcttctagattcttagaaatatgtggacaattttcaaagccctaatcctacaagcacttcactcctcagttttgtctcatatatactacgtgacttttgcttgcccagattgatattctttttcccaggtataatgagtagttaatttgtccttaaatatttttgccaaaaattaggttattgattctaaattgttgtttatgttttatgtaggtgtttactgctatgaatttctctgaacagtttgctgcatctcatatgtttgataggttgtggcttcattttcattcatctgaaaatattttcaaatttttttttttctttgacacattagttacttagaagtatgttttatttccacatatatgtgagtttctcaaactttccgcatttatttatttttactttctatgaaagtcagagaacatactttgggttatgtttatccttttaatttattgatgtttccttgctgtatggcctaccatgcaatctatcctgaagaataacctatgagtacttctctttttttttttgagatggagtctcactctgtcaccagggctggagtgcagtggcacaatctcagctcattgcaatctctgcctcctgggttcaagctattctcctgcctcagcctcccgagtagctgggattacaggcgcctgccaccatgcctggctaattttgtatttttagtagagatgaggtttcatcatcttggccaggctggtcttgaactcctgacatcaggtgatccacccgccttggcctcccaaagtgctgagattacaggcatgagccaccgcacccggccacctatgtgtacttctaatcttgagaggagatttctgtagaaggctatttatatttgttaacagtgttgttcatgtgttatattttcttgctgatattctgtctagtttttctattatttaaattcaggtagaaaagtttctgatctgacaacctcggccattggatttaattatttaacccattcatagccaatgatattatcaatatagttggatttacactggccattatgctttttgctttttttctttttgagatggagtcttgctctgtcgcccaggctggagtgcagtggcgctatctccgctcactgcaagctccgcctcctaagttcataccattctcctccctcagcctcccgtgtagctgggaccacaggtgcccaccaccacacccggctaattttttgtatttttagtagagatggggtttcaccgtggtctcgatctcctgacctcgtgatccgcttgcctcggcctcccaaagtgctgggattacaggcatgagccaccgcacccggcctctttttcttttttcttttcttttttttttttttttttgagacaaagtctcactctatcacccaggctggagtgcagtagtgtgatctccactcactgcaacttccacctcctgggttcaaacacttctcctgcctcagcctccagagtagctgggattacaggcacccaccagcatgctggctaatttttgtatttttagtagggacggggtttcaccatgttggccaggctggtctcgaactcctgacctcaggtgatccacccacctcagcctcccaaagtgctgggattataggtgtaagccaccatgcccagcatatttttattcttcctttactgctttcttttatattagatacttcccatataatatttaaatttctatagtgattgtttatgtttttgcagttactttctttttttttttttttttttttgagacggagtcttgccctgtcgcccagactggagtgcagtggcttgatcttggctcactgaaacctctgtctcccgggttcaaatgattcttctgtctcagcctcctgagtagctgagaatacaggcacctgccaccacgcccagctaattttttttatttttaatagagagggggtttcaccatgttggccaggctggtcttgaactcctgacctcatgatctgcccaccttggccttccaaagtggtgggattacaggcatgagccactgcacccagctactttcttattttctctaggccttataacatagatctttttataatctgcttcatgtttatattaacttaattccaatgagatataaaaatattacctctatatggttcttttgccttgatttagactgaatttagtttttatcaaaatgtatagggtaagccctaacctgcaatgtgattcttttttttttttttgtattttagtagagatggggtttcaccatgttggccaggatggtcttgatctcctgacctcgtgatctgcctgcctcagcctcccaaagtgctgggattacaggtgtgagccaccgtgcctggcagagaacagcaattttagaaagtgattaagtttaagtaagtttatgtgagttggatggaaaagccataggcactcaatgccagcttgtgaaagcagctgcaggggctgtactctgcagagccacaggggtggagctgcctaagaccttgggagctcaccccttgcatcaaagtggcctagatgtgagacgccaagtcaaaggagattattttggaactttaagatttaatgactgccctgctgggttttggagtttgatagacccagagcccttttgctttggcaaattctcccttttggaagaggaatatttacccaatgcctgcacatgcattgtatcttgaaagtaactaacttgtttttgattttacagactcataggtggaagaggcttgccttgtctcagacaagactttaaactggacttttgagttaatactgaaattggttaagaatttgggggactgatgtgaagggatgattgtgttttgaaatctgagaagggcatgaggtttgggagggcccaggggcagaatgatatcgtttgactctgtatccccacccaaatctcgtgtcaaattttaattgtattaatataggtaggggtccagttgtgttctgcataagatcagctttaaactttatttttaaaacaaaaaaagagccaatttttaatgataaattattttgcttcttatttttcagtttggagaacctctagtatatttataatattttataatttattgaatttatgatatcttaatacatgagataatttaaatactttataatatttcaagtgtcattttttcttatttcgttatgaaaattgctaatagatacatttttttctggttatcacaaaactatctgaaaatgtgacatttgccatttatcaaatcttcattgttaatactttacctgaatgggggcttgtaatatgtattataatttttcatgttgtcttaaattaattcggttttattattttattttatttaaaaaagctaaacttataaaattggttgtatattagtttaggtgaaattgcttagtgatgagagaaaaataatttgcaaaatatagagactggatagtttttttaatttttttttttttttttttttgagacagagtttcgctctgtcaccccggctagagtgaagtggctccatctcagctcactgcaagctccgcctcctgggttcacgccattctcctgcctcagcctcccgagtagctgggactacaggcgcctgccacggcgcccggctaattttttgtatttttagtagaggcttgttttataatttataatttagtgttagccaggatggtctcgatctcctgacctcgtgatctacccgcctcggcctcccaaagtgctgggattacaggcgtgagccaccgcccccggcggataattttttataataaaaatgttctttatgtttgccccttaccatttttttttttttttttttttgagatgaagtttttgctcttgttgcccaggctggagtgcagtggcgcgatctcggctcaccacaacctccacctcccaggttcaagcgattctcttgcctcggcctcctgagtagctgggattacaggaatgcgccaccacgtgcggctaattttgtatttttagtagacggggtttctccatgttggtcaggctagtcttgaactcctgacctcaggtgatccacccgcctcagcctcccaaagtgttgggattacaggcgtgagccactgtgcccagctgcctataccattttctttgaaagttgaagttttaactccctaattaggaaacatattcataaatgtgacttgtaaatactgaaatttgtgtttgctttttctgccttcagtagaaatggtgttttctagcatctatgtctttttaaaataaaagagaggatggaagcagaataggttgaaaatgctattaacaaaatgatgttgacagagatgatctatctggtctaccagggcataaaaatttcaaaaatcataatcagtacaaaacctctatgtccgttaatattacagaatattgcttgtgttaaaatcatttatgttggccgggcgcagtggctcacgcctgtaatcccagcactttgggaggccgaggcaggcagatcacgaggtcaagagatcgagaccatcctggccaacattgtgaaaccccgtctctactaaaaatacaaaaaaaaattagctgggcgtggtggcgcgtgcccatagttccagctactttggaggctgaagcaggagaatcgcttgaacctgggaggcggaggttgcagtgagccgagatcgagccactgcactccagcctgggtgacagagcgagactccgtctcaaaaaaaaaaaaaaaaaaaaaaaaattatgttaaaaactctgcctcgccgagtgcggtggctcacgcctgtaatcccaacattttgggacgccaaagcaggcggataacgaggtcagcagttagagaccagcctggccaacatggtgaaaccccgtctctactaaaaagacaaaaaagtagccgggcgttgtggcgggcgcctgtagtcccagctactccggaggctcaggcaggagaatggcgtgaacccgggaggcggagcttgcagtgagctgagattgtgccactgcactccagcgtgggtgagagagcgagactccgtctcaaaacaaacaaacaaacaaacaaaaaacaaaacaaaaaaactctgcctctcatgcatttagtagagataaagtcagagggcagaaccctccgctgatccttatcaggacacctgaagtacagatgatatatttctgttttctctcaaactccatattggatacagttattctgcttctaatccatattattacagtaatgcacagacacgggatcataaaagaacttgcaagctttttaaaaaagtgttatattttacacatgtgtgtatgtatttgtagacagctctgtcatcttggccagagtgcagctcaatcaaacctcaaaattcttagctctcagcctccttggtaaatgggacttcacgtacacaccactacagtggctaattaattttttttttttttttttttttttgtagagatggggtcttattatgttgcccaggcagctctttttttttttttttttttttttgagacagagtctccctctgtcgccaggctggagtgcagtggcgcgatctcggctcactgtaacctccgcctcccgggttcaaacgattctcctgcctcggccccccgagtagctgggaatacaggcgtgcggcatcacacccaggtaagtttttgtatttttggtagagacagggtttcaccttgttagccaggatggtctcggactcctgacctcttgatccacccacctcggactcccaaagtgctgggattgcaggcgtgagccaccgtgcctgggcgattctattttattcgttgatcttttgtggtgcttttacaattttacatctacatattataaatccagtaacaaagagtcataattgttgcttttaatagtgataggttgctttaaaactgaagggtacaatttagtcagatactttggtgctatgcaaatacaatgcttattttttaagtgttatttacaatttttacactcctcagttaaccttggatacaataataactggtggttttgtgatggtttctttagcattttatctatgttgattagtatttggaattctgtaaaaaaaaatttccctatccttttttcttttttatttatttaaagttttttgtgtatcagtgtaaatgcatgggtatttatttatttgacttgatttattttataggtcagtgctctaattattcatttggatgctaacattgttccaggatggaccattgggagttctttcaggctggctccctttgacatgttcccatcattttttaaaattaaaaaaaaagaaagaaaaaacattttgaggctgggtgcggtggctcacgcctgtaatcccaacactttgggaggccaaagcgggcagatcacctgaggtcaggagttcaggaccagcctggccaacatggtgaaaccccgtgtctactaaaaatacaaaaaattagccgagcatggtggcgcgcgcctgtgatctcatccagcagtgctttacttgtaattattttattcctgctgccgtctcctctttctttggccactatctgttccacccccggaacggaagagagatgttggtagggagaggctcttccttcacctctggcagaaaaggtttgcttgggcccttcacaccgctgacatcagagctgcacttcaatgtggcagttattggccatgtgtggcgcctggtctgaagtgcgatgctagaaaggtaaaatacagagttagtttcaaagatttagttccaaatatttatatactttattaataattacatatttctcacacattaaaatgaaaatttttttgatatattgggttaattaaattgttacaatcaattcaacctgttcttgtttctttttcaagtttggctactagaaaacttaaaattcacatatggctcacattttatttcagaggattacctcctttctaaaatctcagcctgcctgctcaaagaccagaaagaagccaggaaggtcataaaatctgaaattttaaaataattgttattataaaattatattttttcctttgtgaagagccatatattatttataaatgcatatgactttacacacaagtttaaaggcaaattccctctggggtgggcctggctcagctctgggaggaagccctgcctgagaaggctgcagcctaggctgtcaccctttcttcactcagcccagcaactgatcacatcttctgtcactcagggcacgagaaggtggggttttaaaagttatccaatcagcgacgctgggttgggaaccgtccaatcaggcctgcagctggagcggacaggacggcttcggggatgtggcggggcctttgtctctcgctgcagctggagctgcaggtctcgccttcactgccctgtgtcctctgctcgcagaggcccagcctctgtggccctgtgacctgcaggtattgagagatccacagctaagacgccaggtaccccggaagcctagaaatggtgagagtgccgggtccgacatcccgagagaggggaaggggcgggttgtaagcggtgggaagtggctgtggtgggacttaggcctccccgcagtcaactctacaatctgcgcccggagttctccttgctcagctcggcctcagtccccttcagccataagatggcggctgcgctgactgcgggatcccgggcgtcctgtcttttccctgcgcagtgactgggccctgacctggagtcctctcagggcagctctggaccctcagcggcgcgtctctcccggattgtgcagggaccactggagggtcccaggggtagaatcctgactcggggtgcgggtttatgaatgggtccgtggggttccagttcctcttctgttgaaaatgtatgggagtcaccgttaaaacactaaagcatttaatcaaagcgtgattcaaaaattgtggagcacccagctgtggtttgtaatttatggtttatgggcggggcttgaagtaaagacttttataaacagcatgatgaagaaaaccaaattcagtaattggttaggttcagatacatagtttcttaatttgtaaaataaaggtgaaaatttcctggttatgtaattagatgttaattggcagtttatagttggttaaggatgaattttgtttctctcaatgtagtaatttactaaaaatgcacctcagttagattttttttttttaagatggagtttcgctcttgttgcccaggctggagtgcaatggggcgatcttgtctcaccgtaacctctgcctcccgggttcaagcgatccaatgcttcagcctcccaggtagctgggattacaggcatgcgccaccacgcccgtctaattttgtggttttagtagagacgggtttctgcatgttggtcaggctggtctcgaactcccgacctcaggtgatctgccctccacggcctccccaaagtgctgggattacaggcgtgagccaccgcgcccagccagatttttttaaaagtaggaatccagggactagagacacctcagtctaatttcccgccgcttaattattttcacactccatggggaactgattttctggtgcatttttcaactgtgtcccaagcactgtcttaaatctaacctcccgtcccccatatctccagcctcactctggcttgcagtaagatattaaatttccagttcctcctggcattccctaatgccagcttttcctccctaattcacgttatcacctgtttgtcttttagtgtacttttgtataccatattttaattaattattttttgacaaagctttaaatgacgctttttaaaaggtttgttacctgtttgtaactttcccatgagaagaaagcaaagaataatcccctgacactgtattgtaaaatttctctgtgcctcttctccttgtatcttctctaggtacaaagatcttgtcagaatgtttttgggtcaaggtattcctttgaaacctttatgaggtgatgtgtcctcagccaccctttagtttttttctggtcgtgggtttcagtactgtctggggatcaaccaagatatccaccatggttatgtcagctaaagtgcctagtgaatatcagcttctggtttattttcttccatagggcgacctgaggtctggagtgtatcctctcaagggagcaagtggatccctggggcagagaggaagcttctagtgtactcttactttgaaaaggtaatcagatgctggtactgaggggaaaacacagaaataacatctgcctcctggattgtctaaggggtagaaatataatgaaataaatgtagtgaaagaaaaaatagtgttaaaaagaaaaaaaaattgtgacagaaaaaatagtatcccaaaagaccaaaaaagaaaaaaaaaatcaagcaaacaaacaaaaaacacaaaaaacctgactccagcagtcaggattttttccagcagttccattagcacttaagttttcccttttggagaagaaaaagatccccatgtcctatggtcttgtagatgcctaattctgtcacccatagccatcagcaaggttaactgagatggtgtaagagcttgcaaagtaaaatgcctctggagcagccaccgagaaatactgcagtgtctcctgaatgggtgcttcttgagcacataagtgagtaggagtgggtggaagaatctctcaagtgactgaatagcctgacttgaaacatgagtcacacacatctgttatttaaccatcattgccacttctggatttgtcaccttgaagagatttgttcacttattttgacctcagttttttagctgtaaattgcattatattagtagggcttgaaaggtaggaaattttttttttttttttttttgagacagtttcactcttgttgcccaggctggagtgcagtggtatgatctcggctcactgcaacctccacctcctgggttcaagtgattttcctgcctcagctggccaggctggtctcaaactcctgacctcagatgatctgccctccttggcctcccaaagtgctgggataacaggtgtgagccaccacgcccggccagcaggaaaatatttacaaagggcataaaagagatgggttttagaaaaagaaattaatgcttaattatatattccatttgttaaaaattctcatttacctttttctttcccagagtgagtttaaaaggtttctcaggtgtgtttgttttttatggctaggtgaattcaaacagaatttcaaggctcagcttttagaatgctagctaccgaggaaaagaatagggaaaatctctattctattttggctgtagaaaatgaatacatgtccataagaaaatgtggtagataattggtgagtaaacatagattcatgaaaacatcagttgctctatctgcaggataggatttttgacagtgaatatctgtgttcacatcctgttatcttgatttctgagtttcatgctacattttatgagatgaaacttggtaccacctagaagtgttcccatatgactaattgtttactacatgatttttaatgaaaacaatacaataatagatatattttcataaaggagtagatacttttgctttttttattgaggtataaaatgtaagtaccttaaaatttccttcccttatatgaacactgtgtttgagtaattttgctggatttttcaaacacgtagtttcaaaaaccaagtgagtaactctaacatggaaactaaagcttgagcccagtgtctcagagctaaggctaatattgagcctacaaaaggaggttattaaaggaccagctagtttatttatgggggatgctcccctgcagatgtccagtctgctcaccccagccatggaagaagcctttctgctgacagagccctggaaagctgaggacccacaggcaaatgcagttaaggttaagatgaaaggggactgagagggtcttactgatgataaagttgttattgttttgaggcagtttctaggctttggaatatcaaacaaagttaggtttatgtaaaaaaaaaaaaaagaattccaaaggagtattgcaacaggaaaaagtaccaactataaaaattttaaggattgcatagtttaggccaacaagggctttctttcctagggagcagcaaacaagattagaaagaaggcaggagagcaatggcaaatgaagggtgaaaagtcagattttaaatcagagaatgttttaccatgaaatcagcatgttcttagaagagacataaaatgagattttatgttgactcagactgagaatagtttaaagttctggggcctgtgaaaaattttatttagaccactgaagacaaattcagctgaatcttttaatgggaaaaagaagaaaatgtgcagagttcttactagaacaaggtcccaattcaagccccacaagagggttcttgatttcgctcaagaaaatattcagggtgagtccacacagtaaagtaaaaggaagtttattaagaaagtaaaggaataaaataatggcttactccataggcagggcagcaccgagggctgctggttgcacatttttatgcttatttcttgattatatgctaaacaaggggtggattatttatgccccccaattttagaccatatacagtaacttctgatgtttccatggcatttgtaaactgttacgacactggtaagagtgtagcagtgagggtgaccagaggtcactctcgtcacatcttggttttggtgggttttatttgacttctttactgcaacctgttttatccgcaaggtctttaaaacttgtatcttttgctgaccttctatcctgtcctgttacttagaatgcctaaccatccaggaatgcagcccagtcagtctcagccctattttatccagcccctattcaaaatagattttctctggttccatatgcctctgacatctcccccttctttttaacatgggcacacttaatcctaagagttgtagagggatgaagattcattttctgtaactacttcatgctgaacaggggtgatgatatttttgcctaactagtcagagtcttcttgaccctgaaaaacaaaacaaaggatcagtgacattttatgcaaagtcaaaaaatataacttcagtcttctattagttcagtccattcagttaattcctattctgtttgatagtcatgaacatttcagttctccatgaatactgaaagttttttctgtattctaatgtcacaatttctaaagttacaacaaacttgcatttgagaacatctgtcaaagtcttaagttaactataaatcatcttttgaagaggatcaacacaacttgattgtctgcatgggaaagtcttagggcagtctcagcaaaaaaaaaaaaaaaaaaaaaaaacatgatcgacaaggaaatttggttagctctgtggcataaaataattttatgtaacaattgtgattattaatgatatacacttagtcattagaattacaggagtttcccataattttggaacacataccaataacatatttacaaaaacagtccaaaaatagtcaaacatgatttcacatttgacatgttttctatgtgattttttatactaaatgagccaaattttactattatatttgtgtattattaatgtcaaacccaattcttaatctttatagacaaacctatccaattttagtatttgaccgtaaggtaatattcttataaaccttttataactctttacaaagtccttgttgtttaagagtagatcagtgctttaagagaaacctgttgtttttatctcaatgttcaatttatagaaaaactgaataatacccatttaactttatatgttcacacacagaaactcttttgcaattaaattttagcaaatctttcacaatttgtttaaaccttcagttttattctaatttaaaacaatcctttaaccttttaatccaggcaaaaaagtccacatttccatgtcttcttataatcttttatcaaaaacacatttcactttctctgcataccttgcatgtaaaactgttttttagtagtcaaagttacatgttacaatgttaactcttagcaacttttacttttgatgaaacccttggtaagtaaaggattttaattacgtactaggcgtggagtccaggacacagacacaagtttatataaggtctgactccagtgtattaatagttagggggtgtggctaacttgatgtgtcccaggccttacctagccgtaaagcaggcaagttgtacagtgaacagtgatagtggcattttgagaagtctttaagaggcctagtaacctttaaattgtacaacatttcttgcataaatttcttttagtgaattatttcatgacttatacagaccatctataatatgtttggactctctgatttgtcctaaacatccatctttttaaataaccagtcattttattttaggataataatttactatacaacatcttttcttatataaaatctcttttctttataacctttgtatatttagggggcatggctaattccatatgtcccaaggccttatttggaatctactggcttcaagataggtaaattgaacaatttttaaaagtcaaagaaccaatttatgaccttaaagtatttggcaaatctaatatctgacctatataatttagatcaaatggtttatattttgaagacatttttattttcccaatgatctttaaaactgtttttatttcaaaaagattacttgtcacatgaactaaaaggcattgcactttttacttttctgacaaaatatttgatttaagctcttattatttttaaaccaattaatcagggttcttttatatcacacacacagacagaagattcagtagttgtaaggtttttctttgtcagtttcttaattggattactagcccacgaccaggaaagcatgtagtttctatggcttaataagtaaacagctggacaacaaaatggattccccctaaattaaggctcccatttttacatcagatcttgtatctaaaaaggagagaatcagttcatcccaagggaagtcttatttctcagtgggacatggggacacctccatacttcctaagtggtccagagtatgtttctctgatccaaatgtgaagagctgagtttttccccataattgcccttagccattccaaaagtatatttctcacccagttattacatgccaaagttcttttataatgtgaagtaattcctgatacccccaaaagtaaaaaacatcagataatgcaatgcaaaacagaagagaaacttagattttgagagggatctattcacttccaattcctggggtttcataaggaaaaagaggtgtttcccaaaacagggtctatagtgtctcttctgtttttcccaaggagtcccaggctgctagagcttgaatatctgcttttaattaagctgacttttaaccatagtgctcttttaaaaagtccttttaaatttcttattaccagactttagtcaggtcaaacggccaatatctctggtttttgaattttaccaaaagtaacttcacaggtgttctgaaaaaggaaaattcaaggtggtttctggaggggaagagaatcaacaaatggtaaagctcacccaaataccaaacaagaaagtactcattccctaagctgagaatggaaccctgaacctgggccaccattaatgatggtggagacaagagaaagtactatcatgtggtcacaaggtcaagcgtccaaggacatgactgagcactttgctgggccatcctgaacagcagccttaaagggtcctaggcctgcattctatcctaaggaacccctcttaatgacagaaccatacagaaagacaaatttatagcacagagtacaacagatttgttacagcttaagactaacctcacaaatgcatctccaaattaattagaactttacataggagataaacagtaattttttttaccattcattccatcagtttacatagagaggctagaattctggtaagaaatttgtacccttttgccagcatgccaggcttctgggcttcctttccctgggttgccctagtgacgtggctggctgcaccacagccctgggggccaagccacaatacaaaggaaaattatctttttctattctggccatagcaaaatatgtgtgacaacacagacattagctactctccttagcaaccaatatcaaatgcaactcttaaacttggccccagttgggccctgtcatcattaattcaacctctgatcaggagtttcaacttgaggcctctgggcaagatggttactctgggaatagaaaagataagaaagggaaaagagagaaaaagcattgcctgtggcaggttggggaaggcaaagagctcagggggccagagaaagacctacccattgcagtgataataaaaagttgaggtggctgcttcttggtaggaaagattttttccagcagtcccattagcacttaagttttcctttttggagaagaaaaatatccctatgtcccatggtcctgtagatgcctaattctgtcacccatagccatcagcaaagagtgcaagacagattaatccaaagagaatagcaatgaatatcccgtagtgtcaaaccagttcttgctgagatggattttactgagaggtttacccaggtatatgcaccccactcacccaaagtcagccagttggtgcacacagatgattttcctttgggtcagagtacagtccctttgtggttgccagaaagatgttactggaaagaagttctgttccagaccccaagagagggttcttggatctcgctcaagaaagacttcagggcaagtccataaagtgaaagcaagttaattaagaaagtaaagcaataaaagagtgactactccataggcagagcagtcctgagggctgatggttgcacatttttatggttatttcttgattatatgctaaacaaggggtggaatatttatgcctctcctttttttttttttttttttttttttttttttgagacagggtcgcgctgttttgccaggctggagtgcagtggcatgatctcagctcactgcaacctccgcctcccgggttcaagcaattctcctgcctcagccaccgaagtagctgggactacatgcacatgccaccatgcccagctaatttttgtgtttttagtaggacggggtttcaccatgttggccaggatggtctcaatctgttgacctcgtgatccacccacctcagcctcccgaagtgctgagattacaggcatgagccaccacatctggcctatgcctctccttcttaaactgctataagataacttccagatgttgccatggcatttataaactatcatagcactggtgggagtatagcagagaggatgaccataggtcactctcatcaccatgttaattttggtgggttttatccagcttctaatactgcaaactgtgttatcagccaggtctttgtgacctgtatcttatgctgaccttctatctcaccttgtgagttagaatgcctaaccatcttggaatgcagcccagtgggtctcagccttatttttactcaggctctattccaaatggagttgctctggttcaatacgcctctgacagaatctgtgtctggctatgtgataaataagaaaagagagcaccatctaagtcataatgggaagggtgtttctttccataaactatttctagagaacacaaaggatgaaggattttattaatcacagctatttacccagattatgtttgtgattcatcattccccacctcttttctttgtcatgtacatttcttccatttgacttttcctgggttgtactttttataataaactagtaaacataactacagtgttttgctgagttctgtgagtagcttgatctaattattgaacttgaggaagtttgtaggagtccccagtttttaaacagtagctcagaagcatagataggcctatgcggtttgtgactggcatctacaatgagggcaatgttgtgagactaagccctgaatcagggtctgtgctgactctgggtggtgtcagaattcaaatgttagacattgagttgctgttggagaattgcttggtattaagctaactctacagatttggtgccagaagaaagatatcacagaggcctgtcctggaataaaactcttggtatctggaaatgggaggctctgctctcctgtacacaggctttcacactgcccattgtcctgggatcccaggcctcctcccagggtgagagaggatgaaaacttagaggaaaggagctctgatgacagacccccttttcccacagctgccaccacaggattcccacccactcccaaacatgcccactagacattgacatgtgcacaccactcccaggactaggcaccaccctcaggaatttcaccacagcattgttgattttagtgtttcttgacaaaaagccacaaaagtgtcaagtctcctggcatatcccaacccccagacagtgaatctgcagcagcaaactattttccccagcaacctagagttctgggcctcctgttcctaatctcatttaactgcatgggcacagaaataaatcagagtccagccccacctgggccactatctgtaaaacaaaaactccgtccacttacattgcattcttccccacgcatggattttttttttctttcaacttttctttttggttcagggatccatgtgcagctttgttatatacgtaaaattgtgtcatggggttttggtgtagattattttgtcactgaggtactaagcataacaccaaacaggtacattttctgtttcttttgttctttcattgtctattctcaactaggcctcagtgtctgtcgttctcctctttgtgtccatgtgttcttattatttagctcttatcaatgagaacatgcatttggttttctgtttctgttttaggttcctaaggataatggtctccagtgtcgtctatgttgctgcaaataacttaaactttttttttttttttttttttgagacagagtctcgctctgtcagccaggctggagtgcagtggtgcgatctcggctcactgcaagctccgcctcccgggttcatgccattctcctgcctcagcctcccgagtagctgggactacaggtgtctgccaccacgcctagctaattttttgtatttttagtagagaatttttagtgttagccaggatgatctcaatctcctgaccttgtgatccacctgcctcggcctcccaaagtgctgggattacaggcgtgagccaccatacctggccttgcaaataacttaatcttgtttttgtttaatttatttattttttgagatggagttttcactcttgttgcccaggctggagtgtgatggcgccacctcagctcaccacaacctccgcctcctgggttcaagcaattttcttgcctcagcctcccgagtagctgggattacaggcatgcgccaccactcatggctaattttatatttttagtagagatggggtttcaccatgttgcccaggctggtctcaaactcctgaccgcaggtgatccgcccgcctcagcctcccaaaatgctgggattacaggctgagccaccacgcccagcttgtttttttttgtttttgtttttttgtttttttattggccacataatcttccatcatgtttacataccatactttgtttttattaaatcttctattttatttaattaattaattttatttggagacagtgtttcactctgttgcaaaggctgaagtgcagtggtgcaatcttggctcacttcagcctcaaccttccaggctcaaggcaccctcttcagccccctaagtaactgggactacaagcatgcaccaccatacccagttaacttctttttctatcgtttgtagagatggggttttgtcatgttgcccaggctggtcttgaactgttgagctaaggtaatccacctgcctcggcctcccaaagtgccgggattacaagtgtgaaccacctcacctgaccataccttattattttaatctagtctacattaataggcaattagatttgttccatgtttttgttttttgtttgtttgagacggagtctcactctgttgcccagaccagagtgcagtggcaccatctcagctcactgcaacctctgtctcctgggttcaaacgattctcctgcctcagtttcctatgtagctgggactacaggcacatgtaaccacacctggctaaattttgtatttttagtagagatggtgttttgccatattggctaggctagcctcgaactcctgacctcaggtgatccaccagcctcagcctcccaaagtgctgggattactggcatgagccactgagcccagcccatgtctttgttattgcaaacagtgttgtaataaacatgcatatgcatgtgtctttatggtagaatagtttatatttctttggatatatactcaatttggaggttgctgggtcaaacagtaattctgttttcagttctgtgaggaatcaccacactgcttttcacaatggttgaactaatttaccctcccaccagcagtgtataaacattccattttctctgcaaccttaccagcatgttactgactttggtttttgagacagtctcactctgtcacccaggctggagtacagtggtgtgatctcagctcattgcaacctccacctccttgattcaatagattctcatgccttagtttctggagtagctggaactacagatgtgtgccaccaagcctgactaatttttgtatttttagtaaagataggatttctccatattggccaggctgctctcaaactcatgacctcaagtgatctgcctgccttgacctcccaaagtgctggggttaccgcacccagcctgttactttctaacaacagccattctgaatggtgtgagatggtgtctcattgtggtttttgttagtttgtttttggcatttctgtagtgattagtggtgagcattttttgcacatgcttgttagccacatgtttgtcttcttttgaaaagcatctgttcatgtttttttgcctactttttaatgaagtttttttttctgtaaacctgcctaacttctttatgaattctgggtattaaacctttgtcaggaacatagtttgcaaatatttttgtttatttggtatgttgtctgtttactccattgatagtttcctttgctatgaagaagctctttaattaggtccctgttgggaaaaagctgggtgttgggagggaaactgaggcaggccttgcataatgtcctctggaatgtgtctagacctgctggctccttgcttctagctttcctaggttcctattcccattatctcaagtagcagaacatgttccttataatgctaaaccatcacagctgtagatcatgcgcctgctcttttgacctccacgttctcaccacctgtttctttgttggattatcagtaaataccgtgggctcccagagctcagggccttcacagcctccataatggtgatggccccctggtgttccatcttttattttttttttgagacagagtctcgctctgtcacccaggctggagtgcagtggtgtgatctcagctcactgcaagctccgtgtcccgggttcacgccattctcctgcctcagcctcccgagtagctgggactacaggcgcccgccacgacacccagctaattttttttttgtatttttagtagagatggggcttcactgtggtctcgatctcctgacctcatgatccgcccgcctcagcctcccaaagtgctgggattacaggcgtgagccaccgcgcctagcctggtgtcccacctttatatctcaaactgtcttttttctcaatcctttgactccaccggactttgtcacccccacgacctgatgttgggtctgatcaccccaagaggtcccatttgtcaatttttgcttttgttgcagttgcttttggtatcttcatcatgatacatgtagatacgtgtggtaagacagtgaaactccagggcctcatatgactctatggtgaggccagaatcaagtatgaaggcttcaagatacattcctgagagttaagtgccacatttgcactaaagggtggcttcaggacctgttctgtttgggtttggtagggacagggcagtggcccatattttcatattttcattactgtagtagaaattgttggtgtctgtggcaggggagggcacctgtggacggtaaaagaggaacatatatttttatttccgtggagcaactcattgttcctgaatctcttctgttataaaggagaaagatgagtggactttttggtcttggtccttctgtctgtgagtgtgaggctagtaggtaagcaggtggtgctgatgcctttaagggacttgtctcaagatgcaggtgttacttgtccagagaattttatctgaaaaggatttctagaggaggagaaagaggaaaaatgcttcttttcagctaaacatatctcagatcaagagctgtgtccactctgcctcctggagtgccatgagtttagtacttgcaaacctttacttctctacttctgttttccctccccaatgattttgtttcacatacttttaaaaattcttgtgatagtcaaggatctctaaaaaatatttctatcctatgtacgagagccttctctacatcatggcttcttatatgcaatgcagaattcctaccatgaatttatgatctgccatattaaaagtgttccttttgtggctgctgaacatgggaagatgtggatactcaagattcctattgggggaaagctggggtccttagtaaagatggagaacatataatgttgaggtgtcgcttgtgttctccattagctctatgcagaacaggattaagaatatgcttatttaaacaggatggcatttatttatttatttatttatttttattgtttgagacagagtctcgctctgttgcccaggctagagtgcagtggcgcaatctcagctcactgcaagctccgcctcctgggttcatgcttttctcctgcttcaacctcccaagtagctgggactacaggcgcccaccaccacacccggctaattttttgtatttttaatagagacggggtttcactgtgttagccaggatggtcttgatctcctgacatcatgatccgcctgcctcagcctcccaaagtgctgggattacaggtgtgagccaccacgcccggcctgttcaggatagcatttattacccaggaagttctggagaaaattattcagagatacctgctttctaggatgctaaagaaaggactacttaaaatcattactaaaaattatagaacatgggagatatcttgaccttcgcatgaaactgattttttctttatggttaaattcagtctataattgactttttgaggggcaatatctcagcagtgatgttgtgttcttctttgtgcatcagcacatcataaaaatttattctagtgttgttgatgttaataatttgcttggttaaagagctctctgactttttttcactatagagttaattgtttttctctttattgttaagtatctttatgtagctaataaactatcacatttaatctggcacctgcccttttttcttaggtttttttgtttgttttttgcacatatgtgtctttggaaaatgaaggctcttatctttgtttacagaccaaaaaagttgggaaaaacacaatctctttcacttactgaatgtctgacaaaatagtcttctggggtcaaaaacattggcattgctagtaaccttgttagaattttaaaaactcagactttattccagatcttctggggaaaaaaaaaaaaagcttcacaacaggatctccagtttattgtacatatttaaatttgagaggtaccatctaactcaacatgtctttttttgtctgaaaaatatacacaactcattatgatgtaaatatagcactcaaaaatgtatacgtttgtgtccttaattatattctttatcatccagaaaagtattatatatgcactggtgttgtggatcttatgccattctctgccctcagagtaatacattagagaatatttctgtgttaaaaattattggataatttcagttattcttataagtcaaccaattctctttactctctcatttcaccttaattcaaataataaattctgcccatggccacttggtaaatatacgtgtgtctgtgcgtatgtgtttttcaggagacgttgacatttagggatgtggccatagaattctctctggaggagtgggaatgcctgaaccctgctcagcagaatttatatatgaatgtgatgttagagaactacaaaaacctggtcttcttgggtgagaataactttaatacataagtcttaatataccctaaacgttttatgtctctttttttgtagaattttctttggtaatttatgctttgtataaatgagtttctgatcccagttttcaagaaaatcttgatgatttgtctctgtagaaaagaatttcttcaacatgtttcatcctgacctgaactttccacattcctgagctgatctgcatccttcactctagattagtggtaattccagaaatttggtggcataaaatattgcccgtatcttaaaatctattttccactgtcaatttttgattcatgagtaccaggtagtgaaattaaggacctacaaatttaaaatattttctaaatagttagagatgtgtctcattaattagtattttaggattaattttctaaaatattctattatatcctttttactgagcacagtactaggttggtaactagagaatataagcaagatttatgctatttacttttaataaagcaggtattgctgtctctaagcaagacccgatcaccagtctagagcaagaaaaagagccctggaatatgaagatatgtgagatggtggatgaatccccaggtaggtgagagtgaacacaacagatgacacagatgagaggtacaaaggtaaaaaaaaaaaaaaagcaagccggcccttacaatgtgatttgggaagctgttttgcaaagtatatagtttctgggaagactgaatattttcttaaaattttctctcactaaagggcatcttctgtcttatgcttttaaattctctaagaattttccttttccttgggtgaacacacaaatatctgcataattttgaaaaacactgtttttttttgttttgttttgttttgttttttgagacagagtttcgctttggttgcccaggctggattgcagtagcgtgatctcaactcactgcaacctgtgccttttgggttcgacgattttcctgcctcagtctcctgggtagctgagattacaggcgcctgccaccacacccagctaattgttttgtatttttagtagagacgggtttttaccatgttggccaggctggtcttgtactcctgtcctcaagtgatctgcgcacctaggcctcccaaagtgctgggattacaagtgtgagccaccgtgcccagctggaaaactctatgttacattattttttagttctctttttgcatcctgtctgaaatatgtgagagtagtggtttctgttccattaggggtttcttgttaatttttctgcatagtccatcctgtttttattactatagtcttaaaatatagtttgaaattataaattatgatgtcctgtccctctgctttgttcttttttttctcaagaatgctttggctatttgaagtttattgtagtttcttgtaaattttagaatcgtattttctattgtgaaaaaaatgccactggaattttattaggaagtttattgaatgtgtagatgactttagataatatggcactttaacaatatttattctttcaatccatagacatgaaattttgtgttgttgttgagacagagtctcgctctgtcacccaggctggagtgcagtggtgcaatctcagctcactgcaacctccactttccgagttcaagtgattctcctgcctcagcctccctaatagctgggattacaggcatgtgccaccatgcccggctaatttttgtatttttggtagagacggggtttcaccttgttgtccaggctggtctcgatctcctgaccttgtgatccgcccaccttggcctcccaaagtgctgggattacaggcatgagtcaccatgcccagccgacataaaatatttttaaatttatttttgtcttctctaatttctttcattgatatcttatatatttcattgtaaagattttttaccttggccagccgcagtgtctcacacctgtaatcccagctctttgggaggccagggaggtggatcccctcaggtcaggagttcgagatcagcctgaccaacatggagaaaccccgtctctactaaaaatacaaaagtggctggccatattacaggcatagattacatgcctgtaatcccagctactcaggaggctaaggcaggagaatcgcttcaacccaggaggcagaggttgtggtgagccaagatggcaccattgcactccagcctgggcagcatgagcaaaactccatctcaataaaacaaaaagattttttaccttcttggttaaattggttttcagaaatttattattttaatactattataaataagattgttttctttattgcatcagatagtttaagtgtatggaagcataacgtatgttaattttatattttgctaatttactgactgtatttattagtttagacaattttgttgttgttcaagacagagtctcactgtgtcacccaggctggagtgcaatggcgcgatcttagctcactgcaacctccacctcctgggttcaaatgattctcccgtagcctctcaagtagctgggactacaggcgcccaccactacacctggctaattttttttgtagttttagtagagacagggtttcactatgttggccaggctgttcttgaagtcctgacctcgtgatttgcccgcctcggcccccaaaagtgctgggattacaggtgtgagccaccaagcccggctttttagacaaattttaatgtactgtttatggttttttatataataagatcatactatccacaaaaagcaactttttacttatttctcttcaattccaatggctttttaaaaatgtttttgactaatccttgtgccatacactttcagtgcttcattaaaatagaagcattgacaatgggcacaatatagttttatattgatatctgtgaatttgaaggagcaaacaactccttaagcttttgttatctggtttcaggaggtaaagatctttttctgttgtgtccctagggtgatgggatgccctctgggtttgtagtgaagaggggttgtagcttggtcacaagactgctcagtctgcactagcatccacctttagatggtttgttaccaagggcttgggtaatcataatttccattttatttttggacagattattctttaagactttgatctgtagggcagacacgagggcagtgtctgcagttggctccatatataatggcccttatatcaggatgtgaatgggtttgcctttcactgagtaccagagaggatttcctcaggtcactgtgtgagtttctacttaagcaaaactggtcatgaactgtggctcagagagctggaactgagtcattaaactacttcagggactacagtaaaaaccaaggcctgtaggcctgtctgcatggctgcaaatgggtgtcttcctccaggtctctgaaagggcaggacctctcttagactgtaactgggaggagtttgggatggttacagagttaacttcagaattctctgttggaccaagttgcgtgggccatttcttggtctgtagccaaaaccaggggtcctgtagtttctcacatgaataagtgcctgtcctctgaaaaaaacactcctcaatcttgggctttagcagagtttcacaactccctccctgggtctcaaagctcttctaaaggcacttacttgggagatgggatcttgtttatcatccgggctggtctggaaatcctggcctgcagcaattctccaacctcagtgtaccatgtagcagtcattacagatgtgagccatgatacctggctgtctcataaaggcatttttttgtcagggatgactgaaaaacttttttgctgtggtgaggataatcaaatagagcaccttttattttttcatgtcactgatgttactgtttctatacatttttactttctattttccatttcaaacttgtctgtaattttagatttggacatttaggacaatatgctagaatttacatgttatgcctgaaataaattagataattgataggcactccatattactagaatggttacttaaatttaagtttgctgcaggtaaaaaggaattataggattttcacccactttcttcagcatatatctaaatgataatttacttgtaaatatttgttttacatatcagaggctctaaccctattttgaaaaatataagttttaatttagcaatgtaatgctgttctttgcttaagttggattacagcagtttcattttgtgtaagaatagcatatatttaaaacataaaaattatcacatttcttttacatgcttattaaaagtttctcattagtatgttctatttataattatactgcatattctgtgaaattttactgccacatagtgcatgccaattattcgaaatacctgccttccatgagtacacaaatattgtagttatccagacaattcttttttaaaggtatattaatgttgcataccagattttatgagtaaacatgtctcttactgttgtgcagttttcatgttagtgttttttcagtgtaggtttcttaacatcagcttattgtgttttttagtttttcttatataattttagccaatttgcagttctgtttgtatactttaagtcaatgtgatgtttaattaagagataaatcagccatacatctatcacaatcggattatatatgtgtgtgtgtttatctataaatatgaccccaatattggttatggcttatcttgtatactttcttagctgattttcagtgggtattttatcttgtctaagcgagtagtcatggaaatactttcattatgtcttattatctccatgtgtctaatgatgaatatatatttcctttgtgtgagagaaacactttttgtgatttgaaggtaatttttgagaagatttgtaatttagtattttttccatttttcctttagaaaaagtaattgttgtaaaaacacataacaggcctggctcggtggctcacgcctgtaatcccagcactttggaggctgaggcaggcagctcacttgagatcaggagttccagaccagcctggtcaacatggtgaaaccctgtctctactaaaaatacaaaaattagctggacatggtggcctacgcctgttgttcgggctacacaggagactgaggcaggagagtcgcttaaacccaggaggcagaggttgcagtgagccgagatcacgccactgcactccagcctgggtgacagagcgagattatgtctcaaaaaaatgagaagaaaaaacagtaaaaacatattaaaatttagcatcttaagtctatttaagtgcacatttcagggccagacgtggtggctcacatctgtaatccctggattttgggaggccaagacaggagtatcatttgagcccagcctgggcaacattcggagattccctctctacaaaaattttttaaaatatccaggcatgttagtgtgcacctgtggtcccagctatttgggagattgaggggaggattacttgagcctgggagtttgaggctgaagtgaggcataattttgccactgcacttcagcttgagtgacagagtgagaccctgtctcaaaaagaagctgtacatttcagtcatgttaaatatattcacattgttatgcaaaagacttctagaaattttacatcttgtgaaactaaaactcagtacccatttaagtaacaagaacccattttaccctctccgcggcccttgacaaacaccgttccactttgtttttatgagtgtgactgcttaagatatctcatatacatagtggaatcatacagtttttatcattttgttatgggcttatttcccatgacataatattttcaaagtttatcttaaaatgtgacaagatttctttgattatatttgatttaattatgataatatttgataatctttgatttctgtgatattggatgtatatgttacattttttatgtgtttgtaaattaagagacaactgggttgcttctgccttttggcttttgtgaatactggtacaataaacatggatgttcgaatttgtgttccaggccctgtgcttcatattttggaaatatattcataagtgagattgctgtatttgatgataattccatttttaattaagaagcatttataacatttaaaataatggttgcatcttgttttctaccaacagtcaacatagttttattttcattgcatcatcaacagatttggtgttttaaaaaaaggtatagtggccattgtaatgagtgtgaggcaattttgttttttcattttatttatttatatatttatttatttatttatttattgtgatgaagtcttactgttatcacccaggctggagtacaatggtgcaatggctcactgcaacctccgcctcctggattccaacaattctcctgcctcagcctcccgagtagctgagattacaggtacctgccatcatgcctggctagtttttgtatttttagtagaaacgggggttttcaccatgttggccaggctggtcttgaactcctaacttcaggtgatcctacctgactcggcctcccaaagtgctgggattacagtcgtgaggtgagcgcccggcctcatttttatttttatatgtttctctgcaaatcattaattctgcttttcttttcaaatgttttatcccatttgggtatattttttgatgaaaattattttttcatttctttcttttttttttttttttgagacggagtctcactctgtctcccagactggggtgcaatcgtgtgatcttggctcactgcaaactctgcctcctgggtttaagtgattctcctgcctcagcctgcctcagccttctcagtagctataggtgcctaccaccatgcctggctgacttttgtatttttagtagagtttcaccatcttggtcaggccagtcttgaactcctgaccttgtgattcacccgcctcggcctctcaaagtgctgggattacctgcgtgagccaccgggcctggccttactttttcatttctaaataaagttattcaactttattgttcagttttaagagttgttcatatactctgaatattaactactttcacttgtgagttccatatattttcacccacttcctagatgacattttcagtctattgaattttttttaatgtgcagaaattctgaagtatagtgtagttaaatatttctgttctttcctttgttgcatatgcatttaatgtcgtatcttaggaaatggtgccaagacccatgtcaagttttttttctaagagattcgctagttttttgtttttttgtttttctgttttttctttttatgtctaagcattttatttgaaatattttttggccaggcgcagtggctcatgcctataatctcagcactttgggagatggaggcgggtgaatcacttgaggtcaggagttggagaccagcctggccaacatggtaaaaccccgtctccactaaaaatacaaaaattagccgggcgtgctagtgcatgcctgtagtcccagctactcgggaggctgaggcaggagaattgtttgaacccggaaggtgtaagttgcagtgagccgagatcatgccactgcactccagccttggtgacagaatgagactccatctcaaaaaaaataaataggccaggcgcggtggcatatgcctgtaattccagcatgttgggaggctaaggcgggagggtcacgtgagggtcaggaggttgagaccagcgtggccaacatatagtgaaaccccatctctactaaaaaatacaaaacttagctggacattgtggcatgtgcctgtagtcccacctacttgggaacctgaggcaggagaatcacttgaatctgggaggcagagatttcagtgagccgaggtcgcaccactgcactccagtctgggcaatagagtgagactccgtcactccaaaaataaataaataaataaaataaaatcgggccgggcacggtggctcacgcttgtaatcccagcactttgggaggccgaggcgggcggatcacgaggtcgggagttcgagaccagcctgaccaacatggtgagacccccatctctactaaaaatacaaaaattagctgggcgtggtggcaggcgcctgtaatcccagctactcaggaggctgagtcaggagaatcacttgaacctgggaggcggatgttgtagtgagccgagatcgtgccactgcactccagcctgggtgacagagcaagactccgtctcaaaaaaaaaaaaaaaacaaatattttttgtatatggttcaaggaaatgattcaactttatcagtgttgttatccagtttatggcattattttttgaaaagattatctcttctctgttgtgtgctcgtggcaaccttgtggaagatcatgtaatcatatacagaaggcttcatttctgggctctccactcttttctttcatctgtttatctgcctttgtgtcagtaccatactgtttttgttattttagcttatttatgtatgtatgtatgtatgttttgagatggagtctagctctgtcaccaggctggagtgcagtggtgcgatctcggctcactgcacctctgcctcccgggttcaagcgattatcctgcctccagctcctaagtggctgggattacaggcacacgctgccacaccccgctaatttttgtattcttagtagagacaggatttcgccatgttggcaaggatggtctcgatcccctgacctcgtgatccacccacctcagcctcccaaagtgctgggcttacagacatgagccacggtacctggcttattttagcttttaatatgttttaaaatttggaagtataatacctctttgttctttttcctgggcgtttggctggttatagttccaaatcaaatttttaaattttagacaagttttctttctttttttttttgagacggaatttcgctcttgttgcccaggctggagtacaatggcgcaatcttggcttaccgcaacctccgcctcccgggttcaagcaattctcctgcctcagcctccggagtagctgggattacaggcatgtgccaccacgcctggctaattttgtatgtttagtagagatggggtttctccatgtaggtcaggctggtcttgaactcctgacctcaggtgatccgcccaccttggcctcccaaaatgctgggattgcaggtgtaagccaccacacccagccatagacaagatttctataatgaaactgtacttttgggatttttaaagagcttatattgaatttgtttcccactgtagtttgtactgacatcttaacaaaattaattttattgaccattgaacaaaaatacgttgaagagtgtcttttatttttattttatttgttttagagacagggttttcttacgttgtccatgctagttttgaacctctgagctcaagcaatcttcctgcccagccttcctaaatgctagtattggaggcatgagccaccgtactcaacccatgtgttttatttttagatattcttggatttgccagttttactttttaatttctagttttattcagttttggtcagaaaacaaagtgtatgattttggtcttcttatttattgtcgttttgagacaggatcatatttatcacccatgctggagtacattgacataaatttgactcactgcaacctcagcctccttgactcaagcgatctttccacctcagcctcctatgtagctgagactacagacatgcactaccatgcctcgctaatttttttggttatttgtagtaatgggtctcactagacagggtctcactgtgttactcaggctggtgtcaatcttctgatcccaagtgatcctcccaccttcatcttccaaattattgggattgtaggtaccaaccacacatccagccagtatttaataagacttgttatgtgtcctaacagaatacatcaggtgcaaataagaacattgtgttgtttcttgcttttaactgaaaagttttgtacctatctgttaagcctagttggtctgtggtatggtttggatgtctatgtcctgcaaacctcatgctgcagtgtaatcctcaatgttagatgtgaaacctggtgggaggtgtttgggtcatggggacaaattcttcatgaatgcctttgtgctatcctggtcatgagaaagttttcactccattaattcaaatgagaactggttcatttaaagaaactgactccttcacctcacgcttgccgtctcttaccatgtgatatgtccagttactctttgtcttccaccatgattgtaagtttcctgagaccctcaccagaagcagatgctgttacacccttcttgtacagtctgctgagctgtgagccaaataaaccttctttctttataagttatacactcaggtattcctctttatgcaaaatagttaatacagtctataatgtctgttttctgttttcttattgatcttttatctgaattttctatttattattgcaaatgatgtcttgatctctacaattatgttgctatgtatttcttgcttcacctttgccaaaatttgctttgtatattttggaaacctcatgttatatatacagacacatatacatataaatagatatgatagttatagattcctggtaaattgacccatttgaccattatgtaatactgtgtttgtcctatgctagtacttgacttaaaatacatccaatataattattaccacctcatccaattgtggttactatttgcatggaatatagttttttttccattctgttactttcaacctatttgacttaatgctaaaatgagtctcttatagacagcaaattgtatgctttttaacttaagccactaagccatcttattttttctttttataaatttatttatttttgagataaagtctcactctgtcaaccaggctggtttgcagtggcatgatcatgactcactgcagcctcaacctcccaaactcagatgatctcatttcagcttcttgagtagctgggttgcaaatatttgccatcccaagcccagatagttttttgtacctttttctgtagatacaattttttgccctgttgtctaggttggtctcaaactcctgagttaaagtgatcagattcctcaacctccaaaagttctgagattacattttttaaataagtagtttaattaatttatatttaaaatgactgcttaaagatataaagttactattaccagtttcattgttgttttttttttaatttaatttaatgtaatttaattttatttcaggatacatgtgcaggatgtgcaggtttgttacataagtaaacgtgtgccatggtggtttgctgcacttattaacccctcacctcggtgataagccctgcatgcattagctatttatcctgattctctccctcccctgcaacaggccccagtgtgtgttgtttccccccatatgtcatgtgttcttattgttcagtttccacttataagtgagaacatgtcgtgtttggttttctgttcctgtgttagtttgctgaaaataatggcttccagctccatctctgtctttgcaaagtacatgatgttgttccttttttatggctgcatagtagtctatggtgcatacgtaccacgttttctttatccagtctgtcacagatgggcatttgggttgatgccatgtctttgctattgtgaattgtgctgcagtgaagatacacatccatgtatctttacagtagaatgatttatattcctttggtatatacccagtataatgggatcgttgggtccaatagtatatctggttctaggtctttgaggaatcgccatactggctttcacaatggttgaactaatttacattcccaccaaaagtataaaagcatttctatttctccatagcctcaccaacatctgttgtttcttggctttttagtaatcaccattttgatggcatgaaatggtatctcattgtagttttgatttgcatttgtttaatgatcactgatgttgagctttttttcatgttttattggccacataaatgtcttcttttgaggcgtgtttcttcttgttctttgcttactttttaatgaggttgtttgttttattcttgtaaatttgtttaagttctttgtagactctggatattagcttttgtcagatggatagattgcaaaaatgttctcccattctgtagattgtctgttcactctgacaatttattttgctgtgcagaagctctttaattagataccatttgtcaatgtttgcttttgttgcaattgcttttgacgctttcctcatgaaatctttgcccatgcctatgtcctgaatggtattgcctaaattttattttagggttcttgtagttttgggtttcaaatttaagttttcaattcatcttgagttaatttttgtataagtgtaagaaagggggtccagtttcagttttctgcctatggctagctagttctcccagcaccatttattaaaagggaatccttttcccatttcttgtttttgtcaggtttttcaaagatcagatggttgtagatatgcagtcttagatttctgagttctctattctgttccattggtctatgtgtctgtttttataacagtaccaggcagctttggttactatagccttctagtatagtttgaagttggatatcatgatgcctccagctttgttctttttgcttaggattctcttggctatatggggtcttttggggtttcatatgaattttaaaatagtttttttctaattctgtgaagaatatcagtagtagtttagtcagaatagcatggaatctataaattactttgagcagtatggccatttttacaatattgattctttctgtctttttgtttgtgtcctctctgattttcttgtgcagcggtttgtagttctccttgaagaggtctatcacttcccttgttagctgtattccttggtactttattctctttgtagcagttgtgaatgggagtttattcatgatttggctgtctgcttgtttatggttggtgtattgaaatgcttgtgatttttgcacattgattttgtatcctgagactttgctgaagttgcttattagatgaagaagcttttgggctgagacaatggggctttctagatctaggatcatgctgtctgcaaacatgtcgtctgcaagcttctgcagacagaagtttgacttcctaattgaatactgcttatttatttctcttgcctgatttcgctggctggaacttccaatactatgttaaataggagtggtgagagggcatccttgtctagtgctagttttcaaggggaatgcttccagtttttgcccttttagtatgatattggctgtgagtttgtcatagatagttcttactattttgatgtatgttccatgaatacctagtttattgagagtttttaacatgaagggatgttgaatttgatcgaaggccttttctgcatctattgagataatcgtgtggtttttgtctttaaatctgtttatgtgatgaattatgtttatcgagttttgtatgttgaactagccttgcatcccaggaataaagctgacttgattgtggtggataagctttttaatgtgttgctagattcagtttgcaagtattttattgagaatgtttgtattaatgtttatcagggatattggcttgaaggtttttttgtttgtttgtttttgttatatctctgccaggtcttgatatcaggatgatgctggcctcatagaatgagttaaggagaggcccctccttttctatcatttggaatagtttcagaagaaatagtactctttgtacctctggtagaatttagctataaattcatctggccctggactttttatggttggtaggctattggctatttgttaccgcctcagtgtcagaacttgttataggtctattcagggattcaacttcttcctgttcagacttgaaaggatggatatgtccagcagtttatccatttcttctagattttccagtttttgtgcacagaggtgtttatagtgttttctgaaagttgtttttatttctatggggtcagtggtgatatcccctttatcattttttattgtctatttcattcatctctctttatagctagtgtctattttattaattttgtcaaaaaaacagctcctggattcattgatttttttttttgaatggtttttttgtgtctctgtgtccttcacttccagtctgaatctggttatttcttgtcttctgctagctttaaggtttgtttgctcttggttttctcgttcttttagttgtgatgttagggtgtccatttgagatctttctggctttttcatttgggtatttagtgctataaatttccccatgaacactgctttagctgtatgccagagattctggtacattgtctcttcattctcattggtttcaaatagtttttttatttctgattttttttttttttttttttttttgagacggagtctcgctctgtcgcccaggctggagtgcagtggcgcgatctcggctcactgcaatctctgcctcccagattcaagtgattctcctgcctcagcctcccaagtagctgggattaccagcacccaccaccatgctgggctaatattatgtatctttagtagacatggtgtgtttcaccatgtttgccaggcttgtctcgaactcctgacctcaggtgatctgcctacctcggcctcccaaagtgctgggattacaggtgtgagccaccatgcccagccaaagcctacagcacccggtattcccaggtggtctcccctccaagtcccagcaaggcccgaccctgcttagcttccgagattgggcacggtcagaagggtgtggctgtggatgccagcctctgatttaattttattatttagccagaagtcattcagtagcaggttgctcaatttccatgtagttgtgtggttttgagtgagtttcttactcgtgagtttttttgttttgtttttgtttgtttgtttgtttgtttgtttgagacagagtgttacactgtcacccaggctggggtgcagtggcatgttatgatttcagttcttttgcatttgctgagaagtgttttacttccaattatgttacaattttttttcttttcttttttcttcttttttttttttgagaccgagtctcgctctgtcacccaggctggagtgcaatggcacaatcttggctcactgtaacctccacctcccaggttcaagcgattctcctgtctcagcctcctgagtagctgggattacaggcacatactgccacgcctggctaattttttttgtatttttagtacagacggggtttctctgtgttccccaggctggatttgaactcttgagttcaggcaatccacccaccttggcctcccaaagtgctagggttacaagcgtgagccaccatgcccagccatatgatcaattttagagtaagtgccatgtggaacttagaagaatgtgtattgtgttgtttgtggctggagagttctgtagatatctgtcaggtccacttgacccacagctgagttcaagccttgttacttttctgtctcaatgatctgtctaatattaacagtggggtgttaaagactctcactattattatgtggaagtctaagtctctttatagttctctaagaatgtgttttatgaatctgggtgctccttgaattgatctctttaccattatgtaacgtacttctttgtcttttttgatctttgttggtttaaagtttgttttgtcagaaactgtgattgcaggctgggctcggtggctcacgcctgtaatcccagcactttgggaggccaaggtggacagatcacaaggtcaggagatcgagaccatcctagctaacacagtgaaacctcgtctactaaaaatacaaaaaattagccaggtgtggtggcgggtgcctgtagtcccagctacttgggaggctgaggcgggagaatgacatgaacccaggagatggagcttgcagtgagctgagatcgcaccactgcactcgaacctaggtgacagagcgagactccatctcaaaaaaaaaaaaaaaagaaactatgattgcaacccctgcttttttttctgcttttatttgctttgtaattttcctccattctttaatttgagcctacatttgtcttttcatgcgaagtgggtctcttgaatacagcacacaaatgggtcatgactctttatccagtttgcccttctatgtctttcaattgaggcattcagcctattacatttaaggctaatattgttatgtttgattttgattctatccaagtggtgctagctgcttattttgcagagtcgttgatgtagttgttttatagcatcattcatctttgtacttcactttgtttttgcagtggctggtaatggtttttttcttcccatatttagtgcttccttaatagctctatctagcaaggcaggcctggtggtcatgtattccttcagcatttgcttctctgaaaagaattttatttttctccagttacaaagacttagtagtgttattttattgttttatttgattcttgtatctttgttcctcattttctctttttctgtctctgtgtcttttttatacttatcttgatatgcttttacttctttcttattttgttttgtgtatctattcagatatattcttggtggtatattaggaattacataatacctctaaaagataaaacagtgtattttaatctggtaaaaaatgaacttcagctggattcataaattttttctcattatatctgccctcaaatttgtcattgatgttgctaatcatatattttatgttgtatatcattaacaaatgtttataatgatttctattcttttacctttcaaattttagagaataattaaaaatgttttttgtgccattattataatgctaagaaattccatttttgtgtatgtgcatgtttccctagaaaataatgtatttatatgataaaattattatttataaaattactttatttaatcgtattattttcagtagaagcaactgctttcagcatcttttatgtttagggcatatgaagtgccaatattttttttcagaatttggttatttttgaaggtttttttctttttattgggcaggactggtattattctcacttgatagctatttttttttaggactttggctatatcacagtttccttctggcctgcaaagcttttgttgacagttcactgactatcttataagactgtgcttgtaaatgacatgccatttttatcttgcagctccattctcttcttgtctgtggtttttgaaattgtgcttatatatgtgtttgttataaatatctttgtgtgtatcctaattgtttgttgagcttcttcattttgacaatattttttctttcagaatttttgagttatattttcttttgatattttttacctttacaatttctgttttttggatattttaaatatttttttcttatcagttttttctggttttctatagttctctgtattcctattttactcattgagtattcaatttatttttaatttttaaaattaatatatacatcttttttatggtttctttctgaaaattttataatatttttgatagaaccattttgccctattttgtattcattgtaatctttgattaaaatttagacattaaataaagctacctgacacagtttttatcttgtagctttctcctggcatagtctgaaaacaattatcttggttagagatcctggtagactctcaaacatgttcttagaatgtatcttgtctaaaattttgtgtttactttttagttaaaggagtttatttctgcttcatcttaatcagtaaccatttgctctgttttctgtctgttgtactgcagtctctctgctgctgtaacaattacctttggtctcaagacccaaactataactccaaaatataccaccatttttttcagcactttatgttacgggagaccagtttctggaaaggcccctagaagcaagtaatatagatgtatgtgccagtattttacttgtttattaaaaaagaaaccaaaagttagcaatttactttgaaaggcagtatgttatattgttgagtaggaagaactgtgttgggcaaaggtaatggacttttctttttcttctgtgtctttgcattcctgtgtactcatctgtgtactcacctggggaactttacatgcttatttataagttttccttatgtattttggtcagtatgcttttattacatttatatgtctatgaaggatttagggcctgtggtattttattatggcatcttgcttatgtagtttgtataatataggttagatttgtaaagtatgtttatcagagtctagtaagttgaataatttgttgtttgtatttctttcagctatgtgttcttcttttaccagagacctttggccagagcaagacataaaagattcttttcaacaagtgatactgagaagacatggcaaatgtgaacatgagaatttacagttaagaaaaggctccgcaaatgtggttgagtgtaaggtgtacaaaaaaggttataatgaactaaaccagtgtttgacaactacccagagcaaaatatttccatgtgataaatatataaaagtctttcataaaattttcaattcaaatagacacaagacaagacatactggagagaaacctttcaaatgtaaaaaatgtgatgaatcattttgcatgcttttacacctacatcaacataaaagaattcatattagagagaattcttaccaatgtgaagaatgtgacaaagtgtttaagcggttctcaacccttactagacacaagagagttcatactggagagaaacccttcaaatgtgaagaatgtggcaaagcttttaagcactcctcaacccttactacacataagatgattcatactggagagaaaccctacagatgtgaagaatgtggcaaagccttctaccattcttcacaccttactacacataaggtaattcatactggagagaagcccttcaaatgtgaagaatgtggtaaagcttttaaccacccttcagcccttactacacataagttcattcatgttaaagaaaaaccctacaaatgtgaagaatgtgacaaagcttttaaccgattctcataccttactaaacataagataattcattctggagagaaatcttacaaatgtgaacaatgtggcaaaggctttaactggtcttcaacccttacaaaacataaaagaattcatactggagagaaaccctacaaatgtgaagaatgtggcaaagcctttaatgtgtcttcacaccttactacacataagatgattcatactggagagaaaccctacaaatgtgaagaatgtggcaaagcctttaaccactcctcaaaacttactatacataagataattcatactggagagaaaccttacaaatgtgaagaatgtggcaaagcttttaaccaatcctcaaaccttaccaaacataagataattcatactggagagaaactctacaaatgtgaagaatgtggcaaagcttttaaccgatcctcaaaccttactacacataagagaattcacactggagagaaaccctacaaatgtgaagaatgtggcaaagctttcaaccgatcctcaaaccttactaaacataacataattcatactggagagaaatcttacaaatgtgaagaatgtggtaaagcctttaaccaatcctcaactcttactaaacataggaaaattcagcagggcatggtggctcatgcctgtaatcccaacactttgagaggactaggtgagcagatcgcgaggtcaggagttcaagaccagcctggccaacatggtaaaaccccatctctactaaaaatacaaaaatttgctgggtgtggtggcaggcgcctgtaatcccagctacttgggaggcagaggcaggagaatcatttgaacctgggaggcagaggttgcagtgagccaagatcgcgccattctactccagcctgggccacaaggcaagactctgtctcaaaaaaaaaaaaaaaaagaaaagaaaattcatactggaacgaaaccctacaattgtgaagaatgtgccagtgctttcaaccagtcctcgaacctttttaagaaaataatttatactggagagaaattctacaaatgtgaagaatatggcaaagcctttaaccagtcttcaactcttactaggcattaaaaattcatactgtacagaaaccctacgagggtgaaaaacatggcaaagcctttaacaagccctcaattcttaacagacataacataattcatactggaaagaaactctgcaaaccagaaagatctggcaatgcttttgacaacacctcaaacttttctaaccataaaagaaattatactggtgagaaatcttagaaatctgaagaatgagacaaagcctttaaatggttgtcacacttgattgtaggtaagataattcatactggagaaaacacctacatgtgtgaacaatgtggcaaaacttaaccagtgctcacaccttattgcacaggaaagcatttgtacttgagataaattatacaaatataaagactgaaaaagccattaatatatgttcatatctcaacaccagatagttcatacttaataaaagcattataagtacaattactgtcaaaagacctttcagaaaatacaagcttttgaccaggcgtggtggctcaggcctataatcccagcactttggtaggccaaggcaggtggatcatgaggtcaggagtttgagaccagcctatccaagatggtgaaaccccatctctactaaaaatacaacaattagccggttgcggtggtggtgcctgtaatcccagctactcaagaggctgaggcaggagaatcacttgaacttggggagggagaggttgcagtgagctgagattgcactctagcctgggccacagagcaagactccatctaaaaagtaaaaaaaaaagaaaatatgaactttacagtgaagaatatttattttgaagatgaatgttacaaatataaagtgggtagtagtgcctttacttgtatcacagatcttattgtagacattttttgtagaggaaaaactctgaagcactttcacactttgttcaatatcagggaatttatattgaagaaaaatcatgcaaatgtagtaaatttggaaaaacactttttcaaaaactacagcttagaaaacagagttcatactagaatatatttttgcagatgcagtaaaagttaaaaaaaatttaatccataagtaagtctgtgtaaatatcagaatttatggtagaaatacataaggcactgacaacatcagatatactaaatcagagggctgagtatagaaaattaaagttggtagaaaaattatttgtatataactttaagaggatcagaaggttttttgcagttataattacattcaaagtatactttatttcttgaaaaatattacagattttttgaaaagtgaataatgatgtcattcaactctgaaattcctgccgtttcttcattcctattggattcacatgtgaaagcatgggatcaattattgctgtatcaaagatatgaaagattctttctttgttttgttctgtttttttgagatggagttttgctctttcgtccaggctggagcacagtggcatgatctcggctcactgcaaccttcaatttccagtttcaagcgattctcctccctcagcctcctgagtagctgggattacaggcgcatatcaccacgcccagctaatttttatgtttctagtacagacaggatttcatcatgttggccaggctggtctcaaactcctcaccttgtgatccacccaccttggcctccaaaggtgctgggattacacaggcatgagccactgctcctggcaagagattcttttttattaggtgggcattatttgtgatcttttctattgaaaagtaaaaacattagaatgtaagatgcataatgaaaatgtaagtggagaggttctttggggttaacttataatattgagtggtgcatgaggttggtgttcagagtaatattctgcattatgaaaaaacatttaattttatttaaaatttagtttatcatactaattgtacttttatataagatgcagtacatttttaaaattttagattgtgtgaagttaatagtttaacatttttaacatgttaaatactattgtgcattcaatgaagcattattataccacaaactttaccctgttccaccttactgaagggtataggtaaaagatggtaacgatatactatttagtaacataatggattaacatctctagtaattttttttgccagtggctttaaaccgcaaataagttaaagaatattgtttctgtaggttaaatttttattttgtttttaatcatttaaatttaattttggtgggtacataatatgagtatatatttatgcacttatatggcatattttagtacaggaatacaatatataatagtagcatcagggttaagtgaggcatccttcacccatagcatttctcctttgttttacaaacaatccaaacctacactttttaaaaattttttgttgttgttgttcttgttgttgttgagacggagtctcgctctgtcgcccaggctggagtgtgcaatctcggctcactgcaagctccacttcccgggttcacgccattttcctgcctcagcctcccaagcagctaggactacaggcgcccaccaccatgcccggctaattttttgtatttttagtagagatggggtttcaccatgttagccaggatggtctcaatctcctgacctcgtgatctggtctcgatctcctgacctcatgatctgcctgccttgacctcccaaagtgctgggattacaggcatgagccaccgtgcccggccactttttataaattttaaaatgtacaattgttatttactatagagttatttttatggtcataatacaaattatatatgagtataaataaaattcatttctaaactattaatattttttccaaattgttatatatttttctttgaacatgtggcctgtctgcctgcaaacatgcagactttttgattcacatagagttaaatatgtattagtctaaagacaaactttaggtgtaagaaaattatggaataagtgtgtgtgtgtgagtatgagtttgtacctattttcagaaaagaacaatatgggaataaaaatcattttaataaggtggctactataaaactaaaaaccttaaaaaatgctgaaagcaaatgtatactttgtgctttgtattgaatttattactgtacaatccatgacttacagttctgaaccttttcatgcaaattctctgtatatacttgcctggtactcatgctagacccatactttttttgtttcttacattttttttgttttatggtttaggaagtattcattatatgagctggtctgtgattataagaatttttatgaaatttagtgcacacaaaataatttttagatgtaattccaaaagtagtgtattaagttacattttatttagtgagagcactccattttgttcttttaaggggagaacaatatataagttttcttttctttagtgattgttcctttcactttttataattgacataagtatatttatttattgagtcaatttgttcaggtaagtactggggggcttcataagtcatgaggatgtttttatatataaatgtagcaaacatacattacagttcttactgtgtaatcgatgctccataataattcacaaatattcctgctggagttagtttgtaatttcaagtcagaaatgaaagatatcagtggtgaagaaataagattgattcttcatatggagtggacattttttccagactataaaactgaatcttgctgaatttaaagagaaattctggccgaggcagatggatcacctgaggttaggagtttcagaccagcctggtgaaacccggtctctactaataaactacaaaaattagctgattgtggtggcatccacctgtagcccagctactcaggaggctgaggcagaagaattgcttgaacccaggaggcgaagattgtggtgagccgagattgtgccattgcactacagcctgggtgacagaatgagactcataaaaaaaaaaataaattctgcttcttttattttctacttctcttcagatttgtttctcgtatgtattttccaactatgtatgcatcacagcccttctttttctgagttatagctacagttttctgactgttctcttcacgccatttcatttcgcctggtattttgtagattttgatgacaaaattctatttttagtgcacttaaaaatggattttaactggtgagttcgcttatcaatataacattcagattagttaattaagataaaagccaggtgtggtggctcacgcctctaatcccagcactttgagaggccgaggcaagtggatcacttgagctcaggagttcgagaccagcctgaccaacatggtgaaaccccgtgtctactacaaatacaaaattagccacatgttgtggcgcatgcctgtaatcccagctactcgggaggctgatgcaggagaatcgcttgaacccaggaggcagaggttgcagtgagccgaaattgcgccattgcactccagcctggacaagagcaaaactctgtctcaaaaaaaaaaaaaaaaaaagattaaaggcgcacactgtccacaggcaagaggattaaattagcattgcatttctttgtttttaaaagaaaaatcttattagattcttatacaaagtgtggcaaatataaaacttgcttgaaaatatggaaattaaatttttaagagagttaatagtaaacgaatttaattttctttttttatttttactttttattttttagagacagagtcttgctctgtctcccaggctagagtacagtggtgtgatcttggctcactgcaagctccgccttccgggttcacgccattctcccgcctcagcctcccgagtagctgggactacaggcgcccgctaccgcacccgtctaatttttttgtatttttagtagagacgggatttcaccatgttagccaggatggtctcaatctcctgacctcgtgatccgcccgcctcgacctcccaaagtggtgggattacaggcatgagccacagtgcccggccacgaatttaattttctatgatataattacagcacaatttacatttccgtgcagaatcttttaagtgtggtggtaaagattgcaaaataataaaatgacctctgaatttaaaatttagaaaaatatgtcttttctatattgattttacaatttggagaaatttctcttattttttatattttttcttttagtgggagaagtttagtctacggtttttatttttagtcaccaagctgtagccaactcctgggtcattttctctgaaaaacatttggagatcatgacaagttttggattaaaacattctgttattttgcatgcaaactagtttactgtgttcacagactggccagtcatgggaccataagcaacacctgcccctttagtggctttcataccattaccaccagtaccagaaactccaggtggcccaagcttaaagtaaaaatcctaaagtacattggcttctcccatgcaatgtgctgggtccaaaccatgctgttaaatatcagagttcctatggttatgactgacaaatgacaataatagccccaaaatacatatttttgatactatttagccaagattaccacaaagatacagtatttgacacattcttattctataacattttgaaaatattttctcttgacagataaaaatgtgtactttttctgtagaacataatattttgaacatgctgttaaatatcagagttcctatgattatgactaaaaaattaaatgacaatagtccccaaactatgtattttcatactatttagccaaagtaatcacaaagacacagtatttgacacattgttattcttttatgtcttaaaaatattttctttcaacttgagaaaatgtgtgctttttctgtagaacatattttgaagtatatatacattgttattatttctaggtaattaatacctcacatagttaacatttttgtggtgagaccacgtcttatcatttttcaaaaatccaaatacattattatgaactatagtcaccatgttgtacaataaatctcttgaacttatttctcctatttgactataattacttattatttgacagactttccaaacccccatttcttctaaataccttggcatctgatggtcaccattttactctatacatcaatgggattaagatttttggaatccatgtataggtgaaatcatgaaatattaatctttctgtgcctggcctatcccaactaatataatgtcctccagcttaatctatgtaatttaaaataatataatttttttcttttttttttttttttttaaggccaggtgtggtgtcttacacctgtaatcccagcactgtgggaagccagggcaggtggattgcttgagcccaggagtttgagaccagcctggtcaacatggaaaatccccgtctctacaaaaaaaaaaaaaaaatctcagctgggcatgggcatggtagtgcatgcctgtaatcccagctactccagaggctgaggcatgagaatcccttgagccagggatgcagaggttgcagtgaactgagattgtgccactgcatccagcctgggtaacagagtgagactccgtctcaagagaaaaggaattttcttattttaaaaataatattctgttgtgtatatctaccacattgtcttcatttactcattagatgttaaactgtttattctgtattttggctattgtgaaaagtgctacaaacagaattgcaaatgtttcttcattctgattttatttgttttggatatatatccagtagtgcaattgctgttatgacatggtagtttaagttttttgagaaatctctattttgtttttcataatggctgtcttcatttacattccaaaccaacagtgtgcaagccttcccttttcttcacatctttaccaacgctttttctttttaataagagtcattctaacaggaacgagttgatatctcctagttttgttttttcttttttggcttgcctttttgtgataattgacattgagcatttttaaatatatcagttggccattatgtatgtattttcttgaaaaatacttatttcagctacttatttttaatagttacttatttttgttgtattgtcatttgagttttgtatatatttttgatattaaccccttgtcacatgtataatttgcaaatattttctccctttttttagttgtcacattctgttcattgtatcagattctgtgcagcagctttttaatttgaagtgatctgactgacttgttcttccttttgtgtcctgggatatttaggttaaatcaaaaaacttgctgcccagaccaatgttatggggctttcactctattttttggtagtagtagtttaagagttttaggccttacatttaagtggctaatttattttgagtttatttttacatatggtgtgagatgagggtctcacttttttttctctgcatgtggacataaagttttctaaacatcatttattgaagatactgttatttcccttaaaaaaaaaagtcacctgtatttaaaatcagttagctgtaaatacactgatatatttctgctctctttttcttctgctccattggcctatatctctgtttttattcaagtgacatactgttttggttaccacagttttgtagtgtatttcaaagtcagggtgataccttcttttgtcttgattgctttggctatttagggtgttttgtggtaacatatgaattttagatatgctttttaaaaatgtctatgaagtatgtcactggtattttgatagaggttgcattatatctgcagatcattttgtgtaatacaaatatttaactattaaaaatgccagttcatgaatgagtaatattattccatttatgtgttacttaatttgtataatgttctttagagtagaatgtaaggtgtttcaactttttggttaaatttacttcaaactatagttaggtagatggaatttttttgaatttcattttgagatagttactaatgtatagaaatgctatgactttttgatgatgtttttgtattttgaaagtttaataaattttgtttgtttattttttgttgttgttgttgtttcaaatggagtctcagtctatcgcccaggctggaatacagtggtgcattttactttgcaagcttttacaccatctcactggagtcagtttgttgttgtttttgttgcttgtcttttgggatactgtagcaggattgataagaaatcagagagactgatggggttgaggaggatatttattatttaggtgcactggcctagtcggattaacatccaaaggactgagccctgaacaaagagttaagttaccctttaagcattttgtgggatggcagggggagatctgtgcagggagaagcatattacagaagcgagaaacaaagacagttattcaattaattgtgacatgcattacataattttttactttccaaggaaaaacatgttttacaacttgagtttatctatctagtgaccttgcagctgcacagctagagaaacagggtcttcaaaatgcctgggaaaggaggagagataagccttgctagccacagaaaaacaggccgttaatttttaaaggactccagctctttctctttctcaggaggaattgggttttcttacatacaactgagtttctgcttacacattctttaatttcttttaatttctgttccaatactatttttttggtcacaaatttttcactttttttttttctttctttgaaacggatctcactctgttgcccaggctggagtgcagtggcgtgatcttggctcactgcaagctctgcctcccagattcacaccattctcctgcctcagcctcctgagtagctgggactgcaggtgcccaccaccacacctggctaattttttgtatttttagtagagactgggtttcactgtgttagccaggatggtctcaatctcctgacctcgtgctctgcctgccttggcctcccgaagtgctgggattacaggcatgagccaccgcatctggcccaatttttttactctttttcttttactatatttatttcactattcttctgcccccttacataatttctatccagggggtagaaattatgtctgtgttttcccctcattatcagcatctgattggctgaccagcaatttgtctccaagaaatgaaagctgggttaggtgaaggcaattttaacagcttttcaaagttagagtacaccagaagattcctcttagccccagggtatccacttgctccctagaaaggatacactccatacttcaggtcatcctaagggagaaaataaaccagaagctgatatccaccggacattcaagctgacataagcatggcagatatctcggtttatccccagatagtactaagcccaggaccagcaaaaaactaaagggtggctgaggacacatcaccccataaattttccaaagcagaactttgacccaaaaacattctgataagatctctgtgcctagagaagataaaacgaaaagagacacagagattttctacaatacaacatcgggggattattatttgctttctcctcatgggaaatatttacaaacagttaatacaacttcttaaaagcaccatttaatgttttaccaaaaaataattaattaaaatatgatataaaaaaagtacactaaaagacaaagaagtgataatgtgaattaggaaggaaaagttggcatttaggaatgccagaagaacctggaaatttagtatcttactgcaagccacagtgaggctggagatatggggcatgggagtttagacttaaaaaccctgcttgggacacaggtgaaaaatgcagcagaaaatcagttccccgtgctgtgtgaaaataattaagtggcaggcaattagactgaggtgtctctagtccctgggttcatactttaaaaaaaactaactcaggtgcattatttttaattactacattcagagaaacaaaattcaggcttcaccaactataaactgcccattaagctctgattacataaccaggaaattttcacctttaatctattgaagtaggaacttaagaaaataacagaataatagcataagtaataatagtaaagattatagtaatagagaaataacaatagctcatagaatgaattgctgtattaaccaaggctaacaagaatttaagtagcccccctgaagttagaagagaatattaactgtctgtcccaggaaacattaaccatatctaccttccacatattttgtaggctctgtaaactcttgtttctttcttccttgcacagctgcaaggtcacaagacagataagcataagctgcaaactaagttttcccagagatgtaagacatgttgcaaaagtgtcacagcagcctttgttctcatttctgtaagcctgcttcctgcttcacacagtgcccacctcaaaatgcttaaaggggactcattttctttgctctgggctcagagtttcaggacatgtgtccgctgtgccagtgtacaccttaaataaacactttccttcactccatttcgtctctccagttccttactttcccacaacagtacaaattaagaaaccacgtaattgtacctaaccaattactaaatttggttttcttcattatgcattttacaaaatgtcaagcgcatccaggtgaagagaccaccaaacaggatttgtgtgagcaacaagcctgtttattcacttgggtgcaagtgggctaagtccagaaagagagtcagcaaagggagataggagcggggcagctttatcgggaacaagtcataatggtagaatgtcataaggtgggttaactagttaaggcaggaactggctgttccacttctttgtgattttttggctgctccagacttcttggctcctgcaggccatctggacatatatgtgcaggtcacaggggttataatggctgagcttcagctgaggcctgacattcctgtctttttatttttaaaatataaagttataagaaaagataaagaaaatataactttttagtgagggtcattggggtaggggtgatatttctcaggactgcttcaagcatgaccagggactgcgtggacaccttaaagaaaattttattatgagttagtccagtaagtttcaggtctagggtgcattttttatgtggctaaagaggtgccagttagcatattttttagcttggaactgccctaagaaaataagttctctaaaaacagtaatcaggcatattagctttaatgtaggtggcgatgagtttttagaccaaggaaggaataatgttttatgtaccaaagctttttgtccccattttccatcatatgaataggattccctgttgttaagccaacgacctattatattactctttttccataggtgtgggtggcaatgtgaatggagaagttcaatagttgtgattgcaaatcctatgcaggagagataataagtaaaataatctttgtttcctggataaagctgaggaagaataaatttttcatgagctaagagccacttgccctgagttggaaagactggtagagcaggttttcagaagaggagtaggtgggggtgatagagtagaaagaaaaatattggccttttggagtgagggctggaatatttgtgggtgtggaggcatttgctatttcttttgctgttctgtcagcataggcatttcctttagcaataagatgagttggtttctggtgtcctttacaatgaatgaccccagccttggctggcaggagagcagccttaaggagagcctttattagagaggcattgataatgtaagagccttgtgtggtgaggaaacctctttcagcccacataacagcatggtggtgcaggatatggaaggcatatttagagccagtataaatattgacgtacagtacctttgcaagagtgagggcccaagttaaggcaatgagttcggctcgctgagagctagtggagtggtgcagagcagtagcctcaatgaaagatgtggaagagactatagcatagcctgcctttgctggtgagtagcaattaggccaagacattttaacaaaattatccactaccctgactattcctggaatacagccgcatctcattgctgcccttcttcccaactcaaagcctgttttgcttcctccccttgtatctctccaccttaatccgcaagtatgggatacctctactccctctttggcaactgaccatgcaccccttaccattccattaaaacctaatcacccttaccccactcaatgccagtatcccatcccacagcaggctttaaagggactgaagcctgttatcactcgcctgctacagcatgggcttctaaagcctacaaattctccttacaattcctctgaattacaattcagaggactatgctgagaactgccatcaataaaccaagtgtgatcagggtgaggaataggaaagatggaaatatggggaaatggagtgaatgccaggtggatcacagacatacagtcatgggggtcaggtgtggtatcaggaataatgtggaaggctggactgaagtccgggccaggaacaagggtaattatgggagactcagtaaagagcaagtatagccaaagaagccagggggcagaaagtatatgcatcaggtgtgaggaagaaaacaaattttgaatgttatgagacttgtggagagtgagttgagcatagtttgtgattttgaggacatcttgagcatagttagtgattttgaggacctctaaaagtattagagtggtggcagtcactgcacacagacatgagggccaggctaaaacagtaaggtcaaattgtttggacaaaaaggctacagggcatggtcccggtccttgtgtaagaattccgaccgcacagccctgcactttggctgtgtatagtgaaaagggttgggatgagtcagggagagccggtgtgggagcagtttttagagctgtttttaaggaatggaaagaagagtggggagaggatttgggatctatggggtcggctgtgttttcctttgtgagtttatataatggttttgttaggatggcaaacccaggtatccaaaggcgaaagtatccaaccatgcctacaaaggaaaggagttgatgctttggtggtggggataggggtctgtgagattaactgaacacagtctgtatgaagagtgcatgtatgttgacaaaggactatgctgagatatgtaacactaggggaagaaatttgaggcttagagggggatagttggtacccctttgagtagagatgttaaagaagtaggatactgttctgatgggaagcttggtaagaggagctgcaaagaagaaggtcgtcaacatattgaatgaggtgagaagcagaggggtggaaagaaactcaatcatgagaaaaggcttggctgaagtaatgagggctgtccctgaagccttgtggcagtacagcccaggtaagctgctgggactgatgggtgtcagggtcagtccaggtaaaagcaaagagaggctgggatgaggggtgcaagggaatagtgaaaagggcatctttaagatcaagaatggaatagtgagctgtggaggaaggtattgaggacaaaagagtgtacgggttgggcaccacagggtggataggcaaaacaatttgataaggcacagatcctgaactaacctgtaagactcgtccggtttttggacaagtaaaatgggggaattgtaaggagaatttgtaggctttagaagcccatgctgtagcaggcgagtgataacaggcttcagtccctttaaagcctgctgtgggatgagatactggcattgagtggggtaagggtgattaggttttaatggaatggtaaggggtgcatggtcagttgccaaagagggagtagaggtatcccatacttgcggattaaggtggagagttacaaggggaggatgcaaaacaggctttgggttgggaagaagggcagcaatgagatgcggctgtattccaggaatagtcagggtagtggataattttgttaaaatgtcttggcctaataagggaactgcgcaggtggggataactaaaaaagagtacataaaagaatgttgtccaagttggcactagagtgggggagtttaaagaggtttagaagcctggctgtcaatacccacaatagttacggaggcaagggaaacaggcccttgaaaagaacgtaatgtggagggggtagcctccatattgactaagaaggggacggacttaccctccactgtaagagttacctgaagcttggcatccatgatggtccggggggcttctgagacgattgagcagcatcagtcttgccaaggagatctgggaaggagtcagccagagagctttgagccagagctccaggggccttagaagtggctgcaatattagttggacagtttgatttccagtggggtcctgctcagatgggacatggcttaggaggaatcctgggctgtgggcagtccttggcccagtagccagttttgcggcacttgaagcaaggtccatgaggaggttttaaaggagtgcccagaggctgcggtttggttgttctgcagtttttgtgtgccaaaggcatggctggagtttgtcttacagcggaggcaagcagttgcagctctgaaagatgttgccacttggctgcctcttgtctattgttgaacaccttgcaggcaagattgattaattcttgttgtggggtttgagggccagattccaatttttgaagctttctttaatgtcaggaggtgactgggtgataaaatgcatattgagaataagatggccttctggcccttcacggtttaggggctgtaaagtgtctaagggtggccgccaaatggcccatgaactgggctgggtttttatatttgatgaaaaagagcctaaatgctaactgatttgagagaggttggataaagaaaaaaggagaattaaccttgactatgccttcagctccagtcatctctctatgaggaaattgttgggcaggttggggagggctagtcacagaatgaaactgtaagctggaccaggtgtgaggggggaggtgatagaaggattatagggtgggggagtggaggctgaggaagaattgcttggcagtggaggagcagcctggggaggagggaaaagttcagatgggtccataggaaaggaggacttaaaggacccagagcttggggtggagactgaaggtacagacaggagagaaagaagaaagatttgagatgagtcatgctgggagcagagactagggagggaccaatgtgtaaagaatgcctggacgtcaggcacttcagaccatttgcccattttttgacaaaacttatctaggtcttgtagaatggagaaatcaaaagtgtcattttctggccatttagagccattttcaagtttgtactggggccaagcagtgttgcagaagaaaataagatgctaggttttaggtcaggtaagagttgaagaggttttgagttttttagaatgcaggttaagagggaagaaggaggaatggagggcagaaggttgcccatagtaaaaaggtaagtttagagaaaagagagggtagagacacagagagagaggggtggtacttgccaccaaggtgaaggatcaaggcaggcatccccgcggtgatcaaacacatctagaatgtgggtgaataatcaggcaggcatccccacagtgattagacaccaagggaagactgtcttcccgagtctgtgaccagcactggagttttgggtccatggataaaacgcgtctcctctgtctctaccagaaagggaaaggaaatgaagggaaaggagagattgaagggtggtgccaaaattgaaaggagaaagaggttgagggatagcaagagaggttggagaagagaataaaaagatgctgcttacccgatttaaaattggtgagatgttttttgggccagtctgaggacccgagtttgtaggtggattttctcatggagcaaaaggcaggaggacaggagattcatttcccaagggaggtcccctgatccgagtcatggcaccaaatgtcaagcacatccaggtgaagagaccaccaaacaggctttgtgtgagcaacaaggctgtttattcacttgggtgcaagtgggctgagtccgaaaagagagtcagcaaagggagataggagaggggcagctctatagggcttgggtagacagtggaaagttacagttaaaagtagttatctattgttagcaggggagggggtcacaaggtgcatggtggagagatcatgggactcattgtccagaagaatcacaggacaatcacagggtcgattgatcagttaaggtggggcaaggaaaagtcacaatggttgaatgttgtaatgttggttaatcagttaaggcaggaactggctgtttcactttctttgtggttttttggctgctacagacttcttggctcctgcaggccatgtggacacatatatgcaggtcacaggggttataatggctgagcttcggctcagatgcctaacacaaaacactttccttcaagcctctcccatagactacaaactacaaaccatagctgtgtgctctacaattctaaaaccactctttaattaaattcttaaatattttggagtgactcccataaagttttaataggcaaaagtaggagctgggaaccccacagaacaaagttcttcccattcctggcactctcatcatttcaaggcttccgggggtcccagcgtcttagctgtggatctataggggaagaagacacagagcaatgaagatgagacctggaactcaagctgcagtgagagacaaaggccccaccaaacctggaagtcgccctgctggctccagctgcatgcctgattggacagttcccagcccagagtcactgattggataacttttgttttgttttgttttgttttgagacggaatctcgctctgtcattcaggctagagtgcagtggcatgatggctcactgcaacctccgcttctcaggttcaagcaattcttctccctcagcctcctgagtagctgggactgcaggcatgagccatggcgtccagcctgtataacgtttaaaaccccaccctctcaggccctgagtgacagaagatatgattaaatgatgggctgcagccctctcaggcagggcttcctccctgaggtgagcttgacccaccccagaggatatttgcattcaaccttgcgtataaggtcatacgcatttgtaaataatatatcatatggcggccaggcacggtggctcatgcctgtaatcccagcactttgggaggtcaaggtgggtggatcacgaggtcaggagttcaagaccagcctggccaacatggtgaaatcccacctctactaaaaatacaaaaattagcctggcatggtgggcagcacctgtggcgcaggtggcacatgtgggctgcaggagccaatctgctactctggaggctgaggtagagaattgcctgaacccgggaggtggaggttgcagtgagcagaaatcatgccactgcactccagcctgggcgacagagtgagactccatttcaaaaaaatatacatggctatacacaaacgaaaataacataataacacatgttttaaaatttcagctttttttggccaagcgtggtggctcatgcttgtaatccaaacactttgggaggctgaggcaggaggatcatgaggtcaggagttccagcccagcctgatcaacatggtgaaaccccgcctctactaaaaaattaactttgggaggccaaggcaggtgaatcacctgaggtcgggagtttgagaccagtctgaccaacatggagaaaccccatctctattaaaaatacaaaattagctgggtgtggtggcacatgcctgtaatcccagctactcgggaggctgaggcaggagaattgcttgaacccccgggaggtggaggttgcagtgagttgagattgtgccattgcactatagcctgggcaacaagagcaaaactccatctcaaaataaattagccaggtgtggtgacgtgcacctgtaatcctagccactcaggaggctgagccagaagaatcacttatacctgggaggcagaggttacagtgagctgagatcatgccactgtactccagcctgggtgacgaagtgggactccatctccatgaaaaaataaaaaaaaaaaaaattcagcttttttaccttcctggtttacagtcctttgagtaggcagcctgagattttaaaaaggaggtaatcctctgaaatagaatgtgagacacatgtgaattttgaattttctagtagccaaactttaaaaagaaacaaagaacgggttgaattgattgtaagaatgtagttaagccaatatatccaaaatatcattttaatgtgtgaggaatatgtaattattaatgaagtatataaatatttgcaactaaatttttgaaaataactgcatattttacctttctagcacattgcagttcagaccaagcacattccaggcacccaggagccacacatggcagctctgatgtcagtggtgtgaagggccagaggggaaggaagggcctctccctactaacatctatcttcagttccgaggttggaacagatagtggccatagaaagagctgaggccagcaggaataaaataaccacaggtaaaccactgctggccacctgttgcccaccttccttttagagatcaggcagttaacaaaggatgatggggccacaggagaaaaaaactctacgtcttcagttctgtccacactcttgaactccaatgtttagatatggagaaaatagattaaaggcatttattttgctatttggccttggccctaattgtctggctgtggttatcggttttcttgagcggtgactgcactcctgtgcactcctggagtgactgcacagaacttcaggcgatctgcctgcctcagcctcctgaagtgctgggattacaggtgtgagccaccacgcccagccaaaatcttctacatataagtgtatgccatgagtgcacacaagaggccttttttaatttctgtcatttgtagagccataagaaaaaaacagcgaacaaagagtgtatgatagcaaagatgtcttgatttttgatcttataaaaaaaaaagtctatctgggccaggtgcggtggctcatgcttgtaatcccagcactttgggaggccgaggtgggtggatcacaaggtcaggagttcgagaccagcctggccaatatggtgaaaccccgactctactaaaaatacaaaaactagctggacatggtggcacacacctgtagtcccagctactcgggaggctgaggcagaagaatcgcttgaacccgggaggtggaggttgcagtgagccaccaccacaccactgcactccagcctggatgagagagcaaggctctgtctcaaaaaaaaaaaaaaaaagctatctatatcaatgttgccatccacttttgagaagaaactttactggttagctttaccttaagatctccaatggatatacaattgcaaatgtttggaggggcccttctgagtcatgagattattaacccaaggttcaaggtcctgaagtcttgctgcagtgtggatggcaagcagactcaatctctgggttatagattataaagagttttactgtcctcagtcagtagaccattaaaagcattctttacctggtgaaaatatgctttgccataatgcactgaagttttgctgcatttaatcatattagacttcagtagcagaagatacatgaggttctattatctggtgcataagacatccaatgactattttataatagtcaacacatttttttcactctcagtgaatctgattgtcatcagtctcaattacaaaaacaatccagtccatttagttagctttgcttaacactattttatcagggctgggtgcagtggctcgctcctgtaatctcagcactttgggaggctgaggcaagtggataacctgaggtcaggaattcaagaccagcctggtaaatatggtgaaacctcgtctctactaaaaatacaaaaattagccaggcatggtggcaagcgcctgtaatcccagccacttgggaggctgaggcaggataatggctgaatccgagaggcggaggttgcagtgagtcgagatggcaccatttgatttatttatacataaatagactgtaacttattattgtaccaaccaccgtgtttttaccaataaaataacatcaagtgttcaagccatgttcaaataaggcaaatcccaagctgtggtcaatctggctgtttctacacctcatgtttattttctgtatgtccctttgctttttctgccataaatctgttttcatcatgtggctgtgctggagtccctctgaccctgttctggattcacaggctgcccaatttgcaaattattctatgctcaaataaactctgttaaatataatttctctaaagtttttttcttttaggctgggcacggtggctcacacctgtaatcccagcactttgggaggccaaggcgggtagatcacgagatcaggagttcaaggccagcctggccaacatggtgaaactccatctctacgaaaaatacaaaaaaaattagctgggcatagtggcgcgcacctgtaatcccagctactcgggagcctgaagcaggagaattgctgaacccaggaggcagaggctgcagtgagcagagattaggccactgcactccaggatgggcaaaagagcaagacttggtctcaaaaaaaaaaaaaaagtttctttctcttaaaagttttcaaatttttttatatgatgaaaaataaataatgtgttgttgggcctcgatttcctaaactcatccctcagctatttccttaaattattctatgtcttttcaaaatgcttcttcaatttcttttctttttttgagacagggtctcactctatcaaccagtcttgattgcagtggtgtaaccaatcatggctcacttcagccttcaccttccaggctcaagcaatcctcctgcctctgccatctaagtagctgggactacaggcatgcaccaccatggctggctaaattttattttattttatttttcatggaaacagcatcttattatgttgcccaggctgcactggaactcctgagctcacgtaattctcccatctcaggctaccaaagtgctaacaatacaggtgtgagccagctagtgcttctgcaatttcttgagatgattattcccaatgataaacagtactgagcacaaatctgaaggaatctggtttcttctgtacaagtgtcactctccaggatttcaagggtctagggcagggcagctactttgtagtgtgatctatggaggtacatgggctttggagtcagacagagttaatcctgagtctcagcccagccacttagtatctgtgggtctttggacaattttcttgatgtgaaagagttctatgaaccacatatggaaaagaggtagattggtactaattgcaaaatggtggcaatttttaatctcttctgtatccatgcccattgccaggtgcttttacaactgtttccatcaagatccagaatctgttttccaaaccctagatctggctggccttattggctcagagtggtagaaacttgtgaacatgacagtgggctagtttggggcccaggctcaaatggtcttgaatgcttctgtttttctttcagaatgctgccatctccctgaataaagccatgttagccagctggaaaataagataccatgggaaggagaagcaaggtgccctgttgacagccccagaactagaagctcacccccagaagcacagctggctagtcaacaagcagctgatgatacgtgtctcaaagagctcagctgagactagaagaacggccccactcagtctagcctaaatggctgaccatctcaattatgaactaataagttttggacgatttgttatgctacaatagctaactaatacatgcaccccgtgcagataggacaccaggattctatgacaggttgattactagttaccttctaacagtgggcaccctataggtactgattttttcccctgatttaaagttgggtgacttgtaagagaatgttgagtaatgcagaaatacacgtagacatgtatgcatgtgattggtgcttatacccacacagtcccacacaccacaggagaaaacagataactacggcctgaccattagggccaaggccaatagcaaaataagttttgcctttaatctgttttctccatatctaaacatttgaggtcaagagtgtggacagatctgaagacacagagttttattatcctgtggccccaacattctttcttcactgtctgatctctggaagaaaatgggcaacaggtggctatcagtggtctccttgtggttattttgttcttgctgccctctgctctttctatggccactatctgttccaccctcagaactgaagggagatgttggtagggagaggcttttccttcacctctggcagaaaaggtttgctggggcccttcacctcccgacatcagagctgcacttcaatgtggaagctttggtcatgtgtggctcctgagtgcctggaatgttcctggtctgaactgcgatgtgctagaaaggtaaaatacagagttagtttcaaagatttagtttcaaatatttatatactttattaataatcacatatttctcacacattaaaatgaaaattttttgatatattgggttaattaaattgttacaatcaattcaacctgttactttttttttttaagtttggttactagaaaatttaaaatttacatatggctcacattttatttcagaaaattacctccgttctaaaatttcagacggcctgctgaaagaccagaagccgggaaggtcataaaatccgaaattttaaaataattgttattatattcttttcatttgtgaataggcatacagtatgttatttataaatgcatgtgactttacacacaaggttaaatacaaattccctctggggtgggcctggctaagctctgggaggaagccctgcctgaaaagacggcagcctaagctgtcactctttcttcactcagcccagcatctgttcgcatcttctgtcactcagggcctgagaaggtggggttttaaacgttatccaatcagcgacgctaggctgggaaccgtccaatcaggcacgcagctggagcggacaggacggcttccgggatgtggcggggcctttgtctctcgccgcagcctgagctccaggtctccccttcgctgctctgtgtcctctgctcctagaggcccaacatctgtggccctgtgacctgcaggtattgggagacccacagctaagacaccgggaccccctgaaagcctagaaatggtgagagtgccgggtcggacatcccgagagaggggaagggctggttgtaaccggtgggaagtggctgtggcgggactcaggcctccccgcagtcagctccacagtctgcgccccgagttctccttgcccagctcggcctcagtcccctccagccataagatggcggctgtgctgacagtcgggaccccaggcgtcctgtctcttcactgcacagtgactgtgccctggcctggagccctctctgggcagctctgcacccgcagcaccgcgtctttcccagattgtgcagggaccacgggagggtcttcaggggacagttctgactcggggtgcgggttcatgaatgggaagagctttgttccgtggagttcccagttcctcttgtcttctgttaaaaatatatgggagtcactataaaaacattaaataatttaatcaaagagtgattcaaaaattgtggagcacccagctgtggtttgtaatttgtgcttcatgggcgggacttgaagaaaagacttttataaaaagcatgatgaagaaaaccaaattcagtaattggttaggtagagttacatagtttcttaatttgtacaataaaggtgaaaatttcctgattatgtaatcagaggttaattggcagtttatagttggttagggctgagttttgtttctctcaatgtagtaatttactgaaaaatgtacgtcagttagatttttttaaagtaggaacccagggactaaagacacctccgtctaattgcctgccttttaattattttcacagtccatggggagctgattttccgctgcatttttcacctgtgtcccaagcagggtcttaagtctaacccccattcctcatttctccagcctccctctggcttgcagtaagatactaaatttccagttccttctggtgtttccaaatgccagcttttcctccctaattcacgttatcgcctatttgtcttttagtgtacttttctataccgtattttaattattttttgacaaagcattaaatgacgcttttcaaaaagttttttaaaagattttttaaaaaaaatatctgtaaatatttcccatgagaagaaagcaaagaataatcccctgatactgtattgttaaaactctctgtgccttttctccttgtatcttctctaggcacagagatcttgtcagaatgtttttcggtcaaggttttcctttggaaactttatggggtgatgtgtcctcagccaccttttagtttttttctggtcgtgggtttcagtgctgtctggggatgaactaagatatccaccgtggttatgtcagctaaagtgcctagtgaatatcagcttctggtttattttcttccataggacgacttgaaatatggagtgtatcctctcaaggaagcaagtggatgccctggggctgagaggaatcttctagtttactcttattttgaaaaggtaacctcttgagacattaaaattgtctacgcccaacccagctttcatttcttggggacacattgctggtcagccagtccgatgctggcactgatgggaaaacacagaaataatgtatgccccctggattgtcttagggggcagaaagataatgaaataaatatagtggaagaaaaatagtgttaaaaagtgaaaaatttgtgacagataaaatagtatcccaaaagaccagaaaaaaacaaaaacaaaaacaaaaaaacctgactctagtgagatggtgtaagaacttgcaaagtaaaatgcacctggagcagtcaccgagaaatactgcagtgtctcctgtatgggtggttcatgagcacataagtgagcaggagtgggtggaagaatctcccaagtgattgaatggcctgacttgaaacatgagtcagacacacatttgttttttaatcagcactgccactccctgggtttgtcaccttgaaaatatttgtttacttattttgacctcacttttttagctgtaaattgcattatattagtagggcttgaaaggtaggaatttttttttttttttgaaacaagtttcactcttgctgcccaggctgcagaaggattgatcttggctcactacaacctctgtctcccaggttcaagcaattctcctacctcagcctcctaagtagctgagattacaggcacacaccaccacacccagctaattttttgtatttttttttagtagagacagggtttcatcatgttggccaggctggtctcgaactcctgacctcagatgatctgcctgcctcagcctcctaaagtgctgggattgcaggcatgagccactgtgcctggcaggtaggaaaatatttacaaagggcataaaagaggtgggttttagaaaaaaaattaatatctaattatgtatcccatttgttaaaaattctcatttacctttttctttcccagagtgagtttacaagtttcctcaggtgtgttttttttatggctgggtgcattcaaacagaattccaaggcttagcttttagaatgctagctaccaaggaaaagaatagggaaaaatctctattcattctggctgtacagaatgaatacatttccatgagataatgtggtagataattggtgagttacatagattcatgaaaacatcagttgctctttttgcagggtgaatttgtgactaaatatctctgttcaaatcctgttatcttgatttctgagtttcatgctacattttatgagatgaaacttggtatcacctagaagtattcccatataactgtttactacatggtttttaatgaaaacaataaaataatagatatgttgtctgaaaggaatggatacttttgcttctcttatttaggtacaaaatgtaagtacctttgagtaattttgctggatttttcaaacacatagtttcgaaaaccaagtgagtaactctaacatggaaattaaagcttgagcccagtgactaagagctaaggctaatattgagcctacaaaaggaggttatgaaaggcccacctatgcggtggctcatgcctgtaatcccagcactttgggaggccaaggtgggtggatcacgaggtcaggagatcgagaccatcctggctaacacggtgaaagcccgtctctactaaaaatacaaaaaaattagccaggcgtagtggtgggcgcctgtagtcccagcttactcgggaggctgaggcaggagaatggcatgaacccgagaggcggagcttacagtgagccaagatcgcgccactgcactccagcctgggcgacagagcgagactccatctcaaaaagaaacaaagaaacaaataaaagcccagctagtttttttctggggatcctcccctgcagatgtcccagtctgctcaacccagccatggaagaagcctttctgctgacacagccctggaaagctggggacccacaggcaaatgcagttaggattaagatgaaaggggactgagaggatcttactgatgatgttgttattgttttgaggcagtttctaggctttggaatatcaaagttagatttatgtaaaaaaaaattccgaaagagtattgcaacaggaagaagtaccaattataaaaactgtaagtattggaaagtttaggctgacaagggctttctttcctagggaggagcaaacaggattagaaagaaggtgggaggggaatggcaaatgaaccgtgaaaaatcagattttagatcagagaatgttttaccatgaagtcagcatgttcttagacgagacataaaataaggttgtatgttgaatcagactgaggatagttcaaagttctggagcctgtgaaaaattttatttagaccactgaagacaaatgcagctgattcttttaattggaaaaataagaaaatgtgcagagttctaccagaaagaggtcccaatccaagccccaaaagagggttcttggattttgctcaagaaaaaattcagggtgagtccatacagtaaagtaaaaggaagtattaagaaaatatcacaaggtcaggagtttgagaccagcctgatcaacatggtgaaaccccgtctctactaaaaacataaaaattagccaggcttggtggtgcacacctgtaatcccagctactcaggagactgaggcaaaagaatcacttgaacccaggaggcagaggttgtagtgagccgagaccgtgccactgcactccagcctgggtgacagagtgacactctgtctgaaaaaaaaaaaaaaaaaagaagaagaaagaaagtaaaggaataaaagaatggcttactccataggcagagcagcccaagggttgctgtttgcacatttttatggttatttcttgattatatgctaaacaagggatggattatttatgcctcccaattttagacaatataggatagcttcctaatgtttccatatttgtaagctgtcatgacacttgtgggagtgtagcagtgagggcaatcagaggtcactctcgtcacatcttggttttggtaggttttatttgacttctttattgcaacctgttttgtccacaaggtctttatgacttgtatcttgtgctgaccttctttcctaccctgttacttagaatgcctaaccatccaggaatgcagcccagtcagtctcagtcctattttacccagcccctattcaaaatagatgtgctctggttcctctgacatctcccccatctttttcacaagggcacacttaatcctgagggttgtagagggatgaagatccattttctgtaactacttcatgctgaataggggtgatgatatttttgcctaactattcagttttcttgaccctgaaacaaaggatcagtgacattttatgtgaagtcaaaaagtattactttcatcttccattagttcagtcccttcagttaattcctgttctgtttgattgtcatgaacattccagttctccatgtatactgaatgttttttctctattctaatgtcacaatttctaaagttatcacaaacttgcatttaagaacatctgttgctgggcacagtggctcctgcctgtaatctcagccctttgggaggccaaggcaggtggattatctgacgtcaggagttcaagaccagcctgatcaacatggtgaaaccctgtctctactaaaaatacaaaaaaaatagctggatgtgctggtggacgcctgtaatcccagcctagttgggaggctgaggcaagagaattactcgaacctgggaggcagaggttgcagtgagctgagattgcatcattacactccagctccagcctgggcaacagagtaagactccatctcaaaagaaaaaaaaaatagaacatctgtcaaagttaactataaatcatcttttgaagagtaccaacacaagatgattgtctggatggcaaagtcttagggcagtcacagtgaaaaaaaaaaaaaaccatgattgacaaggaaatttggttagctctgtgtcatataataattttatgtaacgattgtgattattaatgatgttttaccatgaagtcagcatgttcttagaagagacataaaataaggttgcatgttgactcagactgaggatagttatattatcatattagttacattagtcatattagaattacaggagtttcccttaattttggaacacataccaataacatatttacacaaatatagtccaaaaatagtcaaacatgatttcacagttgacagccttttctgtgtgattttaatactaaatgagccaaatttttactattttatatttgtgtatgatttatgtcaaacccaattcttagtgaattttttttaatttttttttttttgagacagagtctcgccccgttgcctaggctggagtgctatggcaggatctcagctcactggaacctctgcctcctgggttcaagtgattctcctgcctcagcctcttgagtagctggattacaggtgcacaccaccatacctggctaatttttttgtatctttagtagagactggttttcatcatgttggccaggctggtctcgaactcctgaccttgtgatcggcccgccttggcctcccaaagtgctgagattacagacatgagccaccatgcccggcctcttaatgaatctttatagacaaatctatccaattttaatgtttgaccataaggtagtattctcataaaccttttataactcttcacaaagtccttgttgttagagtagatcagtgctttaagagaagtctgtcatttttatctcaatgttcaatttctagaaaaaataatacctatttaactttagtcagtatgttgacacacagaatctcttttgcaattaaattttagcaaatcttccacaatttgtttaaaccttcagttttattctatctaatctaaaacattcctttaaccttttaatctaggcaaaaaaatccacatttccatgtcttcttatataaccttttatcaaaaacatatttcactttctctgaattccttgcatgtaaaactgttttttagtagtcaaaattagatgttacaatgttaactcttagcaacttttacttttgatgaaaaccttggtaagtaaggaattttaattacatactaggagtgaagtctaggacacagacacaagtgtatataaggtctgactccagtgtattaatagttagggggtgtggctaacttgatgtgtcccaggccttacttagctgtaaaacaggcaagttgtacagtgaacagtcatagtggcattttgagaagtcttaatttaagaggcctaatgacctttaaattgtacaacatttcttgcataaatttccttcagtgaattatttcatgacttatacagaccatctacaatatgtttgggctttctgatttgtcctaaacatccctctttttaaataaccagtcattttactttaggataagaatttactatacaacatcttttcttatataaagtctcttttctttataacctttgtatatgtaggggacatggctaattccatatgtctcaaggccttatttagaatctactggcttcaagataggtaaattgaacaatttttaaaagtcaaagagccaatttatgaccttgaaatatttggtaaatctaatatgtgacctatataacttagatcaaatgtttatattttgaagactttttattttcccaatgatctttaaaactgtttttatttccaaaagattacttgtcacatgaactaaaaggtgttacacttttaacttttctgacaaaatatttgatttacgctcttactatttttaaaccaattaatcagagttctttcatatcacacacacaacacatgtaaatacaaagacagaagattcagtagttgtaaggtttttctttgtcaatttctttcttttttttgaaggaaagtttgtattattttaattatttttatgtatagaaaactcaacagtgtacatttaacccagtttagtggcaagttctttagtctttgcctttttgagcttggcgatctgagccacagacttgagacccagggccttccctccccagtgatggcggatctcatcctgtcattgtagttggtcctgatagcttcccccagcttagccaaagcacctttgtcttctgagttaacctgtgtgaagacgacagtggtgcaggtcttcctgtggactagacgtcctagtcttaccttccccttgataatgcagtaagggactccccttttatgacacagggcaggcaagaagacaaccagcttgatgggatccacatcatgcgcaatcaccaccagctgaactttctttttctccaccaaggtggtgacagtgttaattcctgctcgaaggacacgtggtctcttaataaggatgtcccctttgtcagcagctttcttctcggcccgggccaacagcctctgcttctcctcttgctttgtctctggtctgtacttgtaggctagcttaagcagctgagtagctgtttggtggtccaggccctgggtgaactggttaatcacagaaaaacactttcagccgcctatagaggatggctctttgctgctgcaacctgatatagtggggccatttcgggtgaggtcccttttgggctggatgtcctgcccagtgccacaattcttaggccttttctcaaacaggaaattcaccactttcttggcctcctgcttcttcacaacagcaggggttggagccaccttcttcccctaggccttctttccttttggcatcttgggtcgggggaggagagcttctttgtcagtttcttaactggattactagtttcagcgtggagcccagggccaggaaagcatgtcgtttttatggcctaaaaagtaaacagagctggaaaacaaaacagatcctcctaaattaagggtaccatttttaaatcagatcttggatctaaaaaggagagaattagttaatcccaagggaagtcttatttctcagtaggggttggggatacctccatatttcctaggtggtcaagattatgtttctctgatccaaatatgaagaactgagtatttccccataattgccattagccattccaaaagtatagttctcacctagttattacatgccaagtttcttttataatgtgaagtaatttctgataccccccaaagtcaaaaacatcagataacgcattgcaaaacgaacagaaccttagattttgagaaggctctatccaccttcaatttttggagtttcatgaggaaaaagtgtttctcaaaagagggcctgcggcacctcttctgtttttcccaaggtgtcccaggctgttagagcttgaatatctgctgtacttaagctgacttttaaccacagtgctttttttttctttttttttttggaatggagtctcgctctgtcgcccaggctggaatgcagtggcgctcgctatcttggctcactgtaatatctgcctcccaggttcaagtgattctcgtgcctcagcctcctgagttgctgggactacaggcgagtaccaccacaccaggctaattttttgtatttttagtacagatggggtttcaccatgttaaccagaatggttctatctcctgaccttgtgatcagcccaccttggactcctaaagtgctgggattacaggtgtgagccaatgaccacagtgatcagtgctcttttaaaaagtccttttaaatttcttattaccagactttattcaggtcaaacagccaatatctctggcttttgaattttaccaaaagtaacttcacaggtgttctgaaaagaaaattcaaggtggttcctggaggggaagagaatcaacaaatggtaaagctcacccaaatatcaaataagaaagtactcattccctaagccgggaattgaatcctgaacctgggccaccattatgatggtggagaccaagagaaaatactgtcatgtggtcacaaggtggagcttccaaggccatgactgagcacttttctgagccatcttgaacagcagccttaaggggtcctaggcctgcattctatcctaaggtacccctcttaatgacagaagaatacagaaagacaaatttattagctcaaagtacaacagatttgttacagcttaagactaacctcacaaatgcattcccatattaattagaactttacatagaagataaacagtattttttttcaccattcattcaatcagtttgcatagagaggctagaagtctcgtcagaaatttgtacacttttgccagcatgccaggcttctgggttccatttccccgagtggccctagtgatgtggctggctgcaccacagccccgtgggccaagccacaacaaaaagaaaaattatctttttctggccagatcaaaatatatgtgacaacatagaccttagccactcttcttaacaaccaatatgaaactggcaagacttaaacttggccccagttgggccctgtcattgttaattcaacttaataatcaggagttttatcttttggtctctaggcaagatggttactctgagtaatataaaataagaaagagaaaagagagaaaaagcattgtctgtggcagggtaggaaggcaaagagctgaggggtccagagaaagacctactcattgcagcgataataaaaagttcaggtggccgcttcttggtaggaaagagatttttttcccaacagtcccattaacacttaagttttcccttttggacaagaaaaagatccccatgtcccatggtcctgtagatgcctaattctgtcacccatagccatcagcaaagagtgcaagacagattaatccaaaaagaatagcaatgaatgtcccatagtgtcaaaccagttcttagctgagacggattttactgagaggggtctgtaactttctgaatcttaggaaggaatataacctttctaagctcggcctcaaatccaagttcagtcaagcatccttgtcttttattaagaggagcctttaacccactgtgtcttaggagagactctaattctcctaagttgtgcctctaacccaatcccatcctttactcaggcatatgcacaccactcacccaaagtcagccgattggtgcacacagatgattttcctttgggtcagaggtctcttaagtatagtccctttgtggttaccagaaagatgttaccggaaagaagttctgatccagaccccaagagagggttcttagatctcgctcaagaaagaattgagggcgagtccgtaaagtgatagcaagttaatgaagaaagtaagtaaatagaagaatggctttctctataggcagagcagtggctgctagttgcacatttttatggttatttcttgattatatgctaaacaaggggtggaatatttatgcctctcctttttcaactattttaagataacttccagacattgccatggcatttataaactatcatagcactggtgggagtgtagcagagaggacaaccacatgtcactctcatcgccatgttaattttggtgggttttatccagcttctatactgcaaactgtgttatcagccaggtctttatgacctgtatcttatgctgacctcctatctcatcttgtgagttagaatgtctaaccatctgggaattcagcccagtgggtctcagcgttatttttactcagcctctattcaaaatagaggctgctctggttcagtacacctctgacagagtctgtgtctggctatgtgataaataagaaaagagagcaccatctaagtcataatgggaagggtgtttctttccataaactatttctagagaacacaaaggatgaagaattttattaatcacagctatttacccagattatgtatgtgcttcattgttccccacctcttttctttgtcatatacatttcttccatttgacttttcctgggttgtactttttataataaactagtaaacataactacagtgttttgctgagttctgtgagtagcttgatctaattattgaacttgaggaaggctgtgggagtccccattttttttcttttttgagacaaagtttcgctcttgttgtccagtttggagtgcagtgccgtgatcttggctcaccgcaacctctgccttccgagttcaagcgattctcctgcctcagcctccctagtagctgggattacaggcgcccaccaccatgcccgtctaattttgtatttttagtagagacggggtttcttcatgttggtcaggctggtctcaaacgcccgacctcagttgagccacctgccttggcctcccaaagtactgggattacaggcatgagccgccgcacccattgggagtccccaattttttttttattatactttaagttttatggtacatgtgcacaacgtgcaggttagttatatagtatacatgtgccatgttggtgtgctgcacccattaactcgtcatttaacattaggtatatctcctaatgctatccctcccccctccaccccacaacaggccccagtgtgtgatgttccccttcctgtgtccatgtgttctcattgttcaattcccacctgtgagtgagaacatgcggtgtttggttttttgtccttgcgatagtttgctgagaatgatggtttccaacttcatccatgtccctacaaaggacatggactcatcattttttatggctgcatagtattccatggtgtatatgtgccacattttcttaatccagtctatcattgttggacatttggcttggttccaagtctttgctattgtgaatagtgctgcaataaacatatgtgtgcatgtgtctttatagcagcatgatttataaacttttgggtatatacccagtaatgggattgctgggtcaaatggtatttctagttctagatccctgaggaatcgccacactgacttccacaatggttgaactagtttacagtcccaccaacagtgtaaaagtgttcctatttctccacatcctctccagcacctgttgtttcctgactttttaatgatcgccattctaactggtgtgagatggtatctcattgtggttttgatttgcatttctctgatggccagtgatgatgagcattttttcatgtatctgttggctgcataaatgccttcttttgagaagtgtctgttcatatcctttgcccacttgttgatggggttgtttgtttttttcttataaatttgtctgagttcattgctgattctggatattagccctttgtcagatgagtagattgcaaaaattttctcccattctgtaagttgcctgttcactctgatggtggtttcttttgctgtgcagaagctcttgagtttaattagatcccatttgtcaattttggcttttgttgccgttgcttttggtgttttagacatgaagtccttgcccatgcctatgtcctgaatgatattgcctagattttcttctagggtttttatggttttaggtctaacatttaagtctttaatccatcttgaattaatttttgtataaggtgtaaggaaaggatccagtttcagctttctacatatggttagccagttttcccagcaccatttattaaatagggaatcgtttccccatttcttgtttttgtcaggtttgtcaaagatcagatggttgtagatatgcagcattatttctgagggctctgttctgttccattggtctaggtctctgttttggtaccagtaccatgctgttttggttactgtagccttgttgtatagtttgaagtcaggtagcatgatgcctccagctttgttcttttggcttaggattgacttggcaatgtgggctcctttttggttccatatgaactttaaagtagttttttccaattctgtgaagaaagtcattggtagcttgatggggatggcattgaatctataaattaccttgcggagtccccaatttttaaacagtagctcagaagcatagatgagcctatggggtttgtcactggcatctggaatgaggacaatgttgtgggactgagatctgaatcagggtctatgctgactctgggtggtgtcagaattgaaatgttagacactgagttgctgtttgagaattgcttggtgttcagcaaactctacagatttggtggcagaaggaagatatcccagagccctgtcctggtataaaatgagtgtctgcaaatgggaggctcttctctcctgcacacaggctttcacactacctattgtcttgggatcccagggctcctgccaggattgaagaggatgaaaacttcaaggaaaggagctctgatgacagacccccttttcacaaagctgccaccacaggattcccacccacacccaaatatgcccactagacattgatgtatccacacctctcccagcactaggcaccaccctcaggaatttcactatagcattgttgattttagtgtttcttgacaaaaacccacaaaagtgtctacaagtctcctggcatatccccacatgcagacgctgaatctgccacagcaacctgttttccccaccaagctagggttctgggccacctgttcataatctcatctgcctacaggcacacagaaataaatcagagtccagccccacctgggccaccatctgtagaacaaacaactccttgcacctacattgcactcttccccacgcatggattttttttttcttttaacttttctttttggttaaggggtccatgtgcagctttgttatataggtaaaattgtgtcatgggagtttggtgtagattgttttgtcactgaggtactaagcgtaaaaccgaacaggtatttttttctgatcctttttgtcctttcgttctgcattctcaactaggcctcagtgtctgtcgttcccttctttgtgtccatgtgttattattatttagctcttataaatgatagcatgcatttggttttgtttcactttagctttctaaggataatggtctccagcatcatctatgttgctgcaaataacttaatcttgttttttttttttaatggccacataatcttccatgatgtttatgtaccgtactttgttttttattaaatcttctattttatttaattaatttatttggagactgtgtttcactctgtcacaaaggctgaagtgcagtggtgcaatcttgactcacttcagcctcaaccttccaggctcaaggcaccctcttacttcagcccccaaagtagctgggactacatccatgcaccaccatgcccagctaacttctttttctatcttttgtagagatgagttttgccatgttgcccagggtggtcttgaatgcttgagctaaggcaatccacctgcctcggcctcccaaagtgctgagattacaagtgtgaaccacctcacccaaccataccatattattttaatctagtctaccattaataggcagttaggtttgttttgttttatgtctttgtttgtttgtttgagatggagtcttactctgtcacccagactagagtgcagtggtaccgtctcacctcactgcaacctctgcctcctgggttcaagcaattctcctgcttcagcctcccatgtagctgggactgcaggcatgtgccatcacgcccggctaatttttgtatttttagtagagacagagttttgccatgggattattgtatgcagcctattattgactttctaattacagccattctgattggtgtgaggtggtatctcattgtggtctttttttgcttgttttttgcatttctctagtgattagtggtgagcatttgttgcacatgcttgttagccacgtttgtcttcttttgaaaagcatctgttcatgttttttgcctacttttttttctttttttttagacagagtcttgctctgtcccaggctggagtgtagtggtgggaccttggctcactgcaacctctgcctcctaggttcaagctattctcctgcctcagcctcccgagtagctgggattacaggtgtgcgccaccacgcctggctaatttttttggatttttttagtagagacggggtttcaccatgttggccaggtttcaaacccgaccccatgatccgcccgcctcggcctcccaaagtgctgggattacaggcgtgagccaccgcacccggccatttgtctactttttaatgaattttttttttttttttgctctgtattctgctgccttgttctgcgagtctgtttttgtaccaataccgttctgcttttgttaccgtagccctctagtgagtgtggtttgaagtggggtaatgtaatgcctccagctttgttctttttgcttaaaattgccttggcaattcaggctcattttggttccatataaattttaaaatagttattttttagttaacagcgttttggtagtttgatacaaatagcattaaattggtaaatgtctttgggcagtttggccattttaataatattgatcttttctatctgtgagcataacatgtttttttaatttgtttgtgtcatctctgacttttgttgttcttgagacagagtcttgctctgtcacccaggctggagtgcaatggtgcgatctcagcttactgcaacctctgcctccctggttcaagctattctcctgcctcagcttcccaagtagctgggattacagtcacatgccaccatgcctggctaattttttttgtattttaatggagacagggtttcaccatgttggtcaggctggtctcgaactcctgacctcatgatccgcccacctcggcctcccaaagtgctgggatacaggtgtgagctactgggcctggccatctctgacttctttaagcagtattttgtcattcttgttatagagatctttcacctccctggttagctgtattcctagatattccattctttttgtggcagttgtgaatgggattatgtttttgatttggcttttggcttggatgttgttgatgtaaacggatgccattgatttagtaccctgaaactttgctggagttgtttatcagtttaaacagctttttgctgagactgtagggttttgaagatatagaatcttgtcatctggacataaggatagtttgacttcctctcttcttttttggatgtcttttattttaatctttttcctgattgctttggccaggacttccaattctgtgttgaataggagttttgagggaaggcattcttgtcttgtgccagttttcaaggaggaatgcatccagcttgtgtccattcagtatgttggctgtaagtttgtcatagatgactcattattttgaagtatgtaccttcaatgcctagtttgttgagggttttaagcatgaaggatgttaaattatattgaaagtgtttttagcatctattgagataatcttgtgggttttgtctttagttctgtttatgtgatgaataatattcattaattgttgtatgttgaaaaaaccttgcataccagagatacagcctacttgatcacactggattaacttgatgttctcctggatttggtttgccagtattttgttgagaaagttttcttcagtgttcatcaaggatattggactgaagttttctattttttgttttatctctgccaggttttggtatcagaattctatatagaattatgatatatatatatagtatacaaaaagagtatactattctttttgttgttgttgttgttgttggaggcggagtctcactctgttgccaggctggagtgcagtggcgcgatcttggcttaccacaacctccacctcccgagctcaagtgattcgcctgcctcagcctcacgagtagctgggactacaggcctgggccaccacacccaggtaatttttgtatttctcgtaaagacgggttttcaccatgttggccaggatcgtcttgatctcttgacctcatgatctgcccacctcagcctttcaaagtgctgggattacaggcatgagccactgcacctggctgatgctattcttatataatgagttgaaaaggagtcccttttactcagtattttaaaataattttggtagaattgataccagctctttgtacatcaggtagaattcacctgcaaatttgtctggtcctgttctttttttggttattaggctatttattactaattcaattttggaacttgttggcctattcagggattctgttttgttgctgttgttattgttcagtctttggaggatgtatctttgctccaaggttgcagtcctaaacttggcccaaatgaactctctacttatattcatgttgcctcagcctttttttttttttttttaggtagacatattacttagagtatgctagaacagcctctatgaggagatttttcctttgattgtactttacttgatgtaacacccaaggatgcaagccaggttgatcccacctagaatctgcacataacatcttgcttctgcctgggattcacaagacagggccagactttggattgagaatatacagaaaaccaataggaggcattttctgcattgtgagatgtcaacatagacatctgaaaccccgctttgagaatgtggctttttaagctttttagatcttgttcaatgacctgttacagttatgtaagaggctccaggtgtaaatagagtctgatgacagaatctttaagtttaaacaagcatcttaagagtgagagatcaaggccacaaaatatccagagccatgacaaccacaactatacctacgtgtaaaatgtcatgctggagcagagtattcttgtccttcctcttacccaaaagtgaatgaatcaggataggtgatccaggttctggagctccaccagagcagttccattttctatttagaatcagcctgagtctctccatcctggcttatcagtgggccctcagccgtggatcactaagaaccgtctcacaatcacctaggcatctttgagacatttgaggatgtccagggcagaactgtgtcaggctgacaagagtgattaattctgcttctctcagtataagagaaagaagtaatcctgtgttttttactcccttcatataagaggtcactttagttggtaccaagatgagagtttctccagtttcctagtacttaggtgaaagacaaagaggaggtcttgtgactcaaataaactaattgcttccatttcatatggtcattcaaaacatagatgaaccaggtgcggtggatcatgcctgtaatcccagcactttgggaggccaaggtgggtggatcacgaggtcaaaacatcaagactatcctggccaacatggtgaaaccccatctctgctaaaaatacaaaaattagctgggcttggtggcacgtgcctgtaatcccagctactcaggaggctgaggcaggagaatctcttgaacctgggaggtggaggttgcagtgagctgagatcatgccactgaactccagcctggtgacagagcaaagttccatctctaaataaataaataaataaataaataaagcagtcatgatccctaccatccaggaacttttagtctagactagcaactgggtacatggttgaattaagtattgtatggttagtacaatgaatagatgtgtacaaaaaaacttgagctttatttgggccactttttttgtattgttgtgacttctgatatcatctgaagggatatttatggacaggagaattttattattattcgtgtttcttttaccttgctaagaatacatatatatcatctgataaaattatcctagaaaaccttgagagatttgtttaagttgcttattattatatgttataacattgaaagggcagattaaagttacataaactctgggattttagtttctcttaggtaaacttaggaaaaactgaactggaaataccccagtggcatagagaacagaattctacagagggtccagtgcctaacccaggtctgttttgtttgtttgtttgtttgtttgtctaagatggagttttgctcttgttgcgcaggctggagtgcagtggcgcaatctaggctcactacaacctccacctccctggttcaagtgattctcctgcctcatcctcccgagtagctgggattacaggcttgcaccaccatgcctggctaatttttgtatttttagtagagagaaggtttctccatgttggtaagactgatctcgaactcccgacctcaggtgattttcccacctaggcctcccaaagtgttgggattacaggcgtgagccaccgcaccaagcgttcaccccttgttttttgtttttttgttttttgcttttttcagttggagtcttgctcttgtttcccaggctggagtgtagtggtgcaacctcggctcactgcaacctctgtctcccaggttcaagtaattcttgtgcctcagcctcccaagtaactgggattacaggtgcctgtcaccacatccagctaattgtgtgtgtgtgtgtgtgtgtgtgtgtgtgtgtgtgtgtgttttcttgaaatggagtctagctctgtagctcaggctggaatgcagtggcatgatcttggcacactgcaacctccatctatgggagtcaagcgattgtcctgctgcagcctcctgagtagctgggattacaggcacctgccaccatgcccatctaatttttgtatatttagtagagacagggtttcaccatgttggacaggctggttttgaactcctgacctcaggtgccacctgcctcaccctcctgaagtgctgcgattacaggcatgagccactgtacccggcaatttttgtatcttcagtggagacagggtttcaccattttggccaggctggtcttgaactcctgacctcaggcgacttacccacctcagcctcccaaagtgctgggattataggcatgaccaccacacccgaccagattcaccctttttggagcccttatttaggtctggccccaccctggagtcttgcatcacaaagctgatttaaaaagatgagagtttttgctggtgaatcctgctgcctttctagagctggtgctcaaaatttcagaaacccaaaagcaggtaaatgagaaaaataaactgtatattttgggatcctaatttttaagttttgtgttaaaaccagtgcttacagaaatattccatttagcaacttgttttctattcctgcagatccagtagttgctccacaagtaacaaaaaagtaaatataaacacaataaaaatttctctaaactacattaaattctctcattctgtatccctcctatctgtctatatttagcttttattctatacattttatttttaaaaatgacagagaaacagatgaagaaataaaaatgctgaaccctttatctaaatcctgggaattattgaacacttagagtcaacttccagggtgttatgaggattaagtcacataatgtgttattccccacatagtgctctgtaacatactcttgagcagatagtacctgcttaataaacattgcattattacatgtttacatgttgtttttcaaatgcagaattattctgaaattgctgctttctgtttcctctgtaaactttaaagagccagcaaagaatacgaaacgtttggatggagattggttgtctccatttgtaccagaaatatttgtgttgtgacaacagagctgagtgtaagggactctgtgctgtgcccgctttctctaactactgctaataatgaacccaggggtagcaacatcagcattggcaggggacttgtttgaaatacccattcatggactttttccaaacctgcagattcacattacatagattgggaccaaaattcccaagtaatgttggttttttttgagacggagtctcgctctgtcacccaggctgaagtgtaatggcacgatctcgtctcactgcaacctctgccctctgggtttaagcgattctcctgcctcagcctcctgagtagctgggattacaggcatgcaccaccacgccagctaattttttatttttagtagagatgaggtttctccctgtttgtcaggctggtcttgaactccagacctcaggtgatccgccccactctgtgtcccaaagtgctgggattacaggcgtgagtcactgctcctgatcctattaccaagtaatttttaagctcattaaagcttgagaggcagtgcttatcagcccacttctctcattaggattacacggtgaaatcctgactctactaaaaatacaaaaattagctgggtgtggtggtgtgtgtctgtaatcccagctactcaggaggctgaggcaggagaatcgcttgaacctgggaggcggatgttgcagtgagctgagattgcaccattacactcgagcctggtaagagcgtgaaactccatctcaaaaaaaaaaaaaaaattgcagaaatctctttacttgtgccctttccacagtttctatttattgttctgggtggaagcatccatgttgttttaatgaagggcctcatgtgactctaagctgaggccagaatcaaatatgagggcttcaaaatacattcatgagagtgaagtgccacctttgtactaaagggtggtcacagggcccgttcagtttgggtttggtagggacagggcagtgtggtgcatatttccattactgtagcagaatttgctggtgtctgtggcaggggagggcacctgtggacaggaaaagaggaacacttttaatatggcagatcatatttttatttccatggagcagctcattttttcctgaatctcttctgttataaaggagagaaatgcatggactttttggtcttggtccttctgtgtgtgggcgtgacactagtaggtaagcaggtggtgctgatgcttttaagggaattttctcaagatgcaggtgttacttgtccagagaattttatctgaaaaggatttccagagaaggaggagaaagaggaataatggcttcttttcagctaaacatgtctcagatcaagagctgtgtccactctgcctcctggagtgccatgtgtttagtacttggaaaccttctctgcttgtgtttttcctccccagtgagtttgtttcaggtactttaaaaaattcttgtaatagtcaagggtctctaaaaaatatttgtttctggctgggcgcggtggctcatgcctttaatcccaggattttgggaggccgaggcaggtggatcacttgaggttgggcgttcaagaccagcctgaccaagatggataaaccccgtctctactaaaaatacaaaattagacaggcatggtagcacatgcctgtcatcctagctactaggaggctgaggcaggagaatcacttgaacctgggagacggaggttgtggtgagccgagatcacaccattgcacttcaccctgggcaactcaaaaaaaaaaaaaaaaatgttttcctatgcaccagacccttctctacatcatggcttcttatatgcaatgcagaattcctaccatgaatttatgatctgccatattaaaagtgttccttttgtggctgttgaacatgggaagatgtggatactcaagattcctactggggaaaagctggggtccttagtaaagatggagaacatataatgttgtggtttcatctaaacccaggaagttgtgaaaaaattattaagagatacctgctctctagagtgctaaagaaagactacttaaaatcattattaaaattatggaatgcgggagatatcttgacctttgcataaaactgattttttaatggttaaattcagtctataattgactttttgaggggcaatatctcagcagtgatgctgtgttcttctgtgtgcatcagcacatcatagaaatttgttctagtgtagttgatgttaataatttacttggttaaagagctctgtgactttttttcactatagagttaattatttttatctttattattaagtatctttatacagctaatgtgcataaaccatcacaattaatctggtgcctgcccttttttcttaggtttttttgtttttgtttttttttgcatgtgtctgtctttggaaaatgaagacacttgactttgtttacaagccagaaacattgggaaaaacacagtctctttcacttgcctaatgtttgacaaaatagtcttcctgggataaaaacattggcattactagtgacctttttagaattttaaaaactcagactttattccagatcttctgaaaaatataaaaaaatcttcatggcaggatctccagtttatcgtgcacatttaaatttgagaggtaccttctgactcaacatgtttttctttgtctgaaaaatatacacaactcattatgatgtaagtatagcactcaataatgtatatgtttgtgtttgtgtccttaattatatactttatcatccagagaagtatcatatatgcactggtgttgtggatcttaggccattctctgccctcagagtaggagaatacattagaaaatatttctgtgttaaaaattattggataatttcagttattcttataagtcagaatcagttctctttactctctcaattcaccttaattcaaataataaattctgcccatggccacttggtaaatatatgtgtgtctctgtgcttgtgtttttcaggagacattgacatttagggatgtggccatagaattctctctggaggagtgggaatgcctgaaccctgctcagcagaatttatatatgaatgtgatgttagaaaactacaaaaacctggtcttcttgggtgagaataactttcatacacaattcttaatatgccctaaatgtttcatgtctctttttttgtagaatttttttgataatttatgctttgtataaatgagtttctaatcccagttttcaagaaaatcttgatgatttgtccgtgtggaaaagaatttcttcaacgtgtttcatcttgatctgaactttccacattcctgagctgatgtgtatccttcactctagattagtgataattccagaaatttagtggcataaaatatcactgcccatatcttaaaatctatttgccatcaccaatttttgattcaggtagtaaaattaaaaacctacaaatttaaaatattttctaaatagttagagatgtctctctttaatcagtattttcagattaattttattttatttatttatttttttgagatggaatctcaccctgtcacccaggccggagtgcaatggtgcgatcttggctcactgcaacctccaccctgggttcaagcgattctcctgcctcagcctcccaagtagctgggattacaggtgcacacctccacacccagcaaatttttgtattagtagatacagtgtttcaccacgttggccaggctggtctcaaactcctgacctcaggagatctgcccacctcacccttccaaagtgctgggattacaggcgtgagccactgcgcctggctaaaacacttttttttttttttgagatggaagtttgctcttgttgcctaggctggagtgcaatgcactatcttggctcactgccacctccgcctcccgggtccaagcaattctcctccttagcctctggagttgctgggactacaggcacctgccaccatgcccagctaattttgtatttttagtagagatggagtttcaccatgttggacaggttggtctcaaactcctgacctcaggtgatctgtccgtctcggcctcccaaagtgctgagataacaggtgtgagcaactgcgcccagcctttggattaattttctaaaatattctatcacatcctttttactgagcacagtactaggttagtaattagagaatataggcaagattcatgttatttatttttaataaagcaggtgttgctgtctctaagcaagacccagtcacctgtctggagcaagaaaaagagccctggaatatgaagagacatgagatggtggatgaacccccaggtaggtgagagtgaaaaaaaacagatgacacagatgagaggtccaaagcttaaaaaaaaaaaatgtgccagtccttacaatgtgttttgggaagctgtgttataaagcatgtagtttctgggaggcctgaatattttcttaaaattttttcttacatagggacatcttctgtcttatgcttttaaattctctaagaattctacttttccttgggggatcttccttcaagtctacaagagagccaaagcatattgtcatagcatataaaagactgtcatggcatataatctgactgcttttttattgttttgggggacgcacaaatatctgtataattttgaaaaattctttgttaaattattttttagttctctttttgaatcctgtctgaaatatgtgagagtagtgatttctgttccattaggggtttcttgttaatttttttgcatatttcatcctgtttgtattactatagtcttaaaatatagtttgaaattataaattatgatgtccctctgctttgttcttttttctcaagaatgctttggctatttgaaatttattacaatttcttgtaaattttagaattgtattttctattgtgaaaaaaataccactggaattatcatggggagtttattaaatgtatagattactctagataatatggcattttaacaatattctttcaatccaagacatgaattttttttttttttgagacagaatctcactctgtcatcaggctggagtgcagtggcacaatcttggctcactgcaacctccacctcctgtgttcaagcgattctcctgcttcagccttctgagtagctgggactacaggcatgtgccaccacacatagctaattttttgtatttttaatagagttggggtttcaccgtgctgttcagactggtctcaaactcctgaccttgtgatctgcccacctcggcctcccaaagtgctgggattatgggtgtaagccactgtgcctggccaacatgaaatattttaaaatttatttttgtcttctctaatttttttcattgatatatatttcattgtaaagattttttaccttcttcgttatatttgttctcagaaatttattttaatgctattattaataagactgttttcttcctctattgtatcagatagttttaagtgtatggaaccataactttatgttaattttatattttgttaagttactgactgtatttattagtttagacaaatttttcttttttttcttttttgagacacagtctcactgtgttgcctaggctggagtgcaatggcataatctcagctcactgcaacctctgcatcctaggttcaagcgattctcctgcctcagcctcctaagtagttgggattacaggcactcggcaccagcccagctaaatttttttttgcatttttagtaagacggaatttcactctgttggccaggctggtcttgaactcctgaccttgtgatttgcccccctcagcctcccaaaatgctgggattacaggtgtgaaccactgcgcctggctgtttagacaaattttaatgtactgtttatggtttttttatatataagatcatatgatccacaaacagcaactttttacttatttctctttaattccaatggcttttaaaaaatgttcttgactaattcttgtgccacatactttcagtgctaccttaaaatagaagcattgacaatgggcgcaatatagttttatattggtatctgtgaatttgaaggagcaaacaactccttagcttttataaacaggtttcaggaggtaaagatctttttctgttgtgtccctagggtgatggaatgccctctgggtttgtagtgaagaggggttgtagctttgtcacaaggctgctgggtctgcactagagtccacctttagatggcttgtcacaagggcttgggtaattgtaattcccattttatttttggacagattgtatatattctttaagactttgatctgtagggcagataccagggcagatttctgcagttggctccttatataatggccctatcaggatgtgaatgggtttgcctttcactgaataccagagaggatttcttcaggtcactgtgtgggtttctgtttaggaaaaactgatcatgatctgcggctcagagagctggaactgagtcaataaactgcttcagggaccacagtaaaaaccaaggtctgtaaacctgtctgcatggctgcaaataggtgtcttcctccaggtctctggaagggcaggacctctcttagactgtaactgggaggagtttgggatggttacagagttaatttcagaattctctgttggaccaagttgggtggaccatttcttgatctgtagccaaaaccaagggtcctgtaatttcccacacgaataagtgcctgtcctctgaaaaaacactcctcaatcttgggctttagcagagtttcacaactccctccctgcatctcaaagctctcttaaaggcacttactttggagatgggatcttgtttatcatctggtctggaaatccaggcctgcagcaattctccaacctcaatgtaccatgtagctgccattaaagatgtgagccatgatggctggctgtctcatgaaggcattttttgtcagggatgactgaataaatttttttttgtggcgaggataatcaaatagagcaccttctatttttttatgtcactgatgttactctttctatacatttttactttcgattttccatttcaaacttctctgtcattttagattcagacatttaggacaatatgctagaatttacatgttatgcctgaagtaaattagataattggtaggcactccatattactaagatggttacttataaatttaagttcgctgcaggtaaaaaggaattataggattttcacccactttcttcagcatatatctaaatgataacataatttctttcttttcttttcttttcttttttttttcttttcttttcttttctttctttatgagatggagtgtcaatctgtcacccaggctggagtgcagtggcatgatctcagctcactgcaacctgcacctcccaggttatagctattctgctgcctcagcctcctgaatagctgggactacaggcgtgtgccaccacatatagttacttttttgtatttttagtagagtcggggtttcaccatattggccaggctggtctcgaactcctgaccttgtgatccacctgcctcggcctcccagattgctgggattacaggcgtgagccattgtgcccggcccaacataatttatttctaaatatttgttttacatatcagaggctgtaaccctactttgcaaaatatacgtttaaatttagcaatgtaatgctattctttgcttctaaagttgaattacagtggtttcaattttgtgtaagaatagcatatatttaaaacgtaaaatttatcatattttttacatgcttatttaaaaagtttcttattagactattctaattatactgcatattctgtgaaattttactgccatacagtgcatgccaatgattcaaaatacctgccttccctgagtacacagtcaactattgtagttatctagacaattcttttttaatggtactttaatgttgcataccagattttatgagtaaacatgtctcttattacgcagtttcttattagcgttttttcagtataggtttcttaacatcagcttgttgtgttttttagtttttcttatataattttagccaatttgcaattctgtttgtatactttaagtcaatgtgaggtgtaattaagagataagtcagccatacgtctatcacgatcagattatatgtgtgtgtgtttatctataaatatgaccccaatattggttatgacttatctcatatatattctttcttaactgattttcagtggctgttttatcttgtctaagtgagtagtcatgaaaatattttcattatgtcttattttcaccatgtttctaatgatgaatatatatatatatatttttttttttttttttttttttttttagacagagtctcgccttttcgcccaggctggtgtgcagtggcacaatctcggctcacggcaacctccacctcccgggttcaagtgattctcctgcctcagcctcctgagttgctgggactacaggcatctgccaccatgcccggctaattttttgtatttttagtagagatgggatttcaccgtgttagccaggatggtctcaatctcctgacctcgtgatccacctgccttggcctcccaaagttctgggattacaggcatgagccaccgcacctggcctgaatatatattttctttgtgtgagaaaaacatttttgtgatttgaaggatattttgagaagatttataattctgtatttttttctgtttttcctttagaaaaattaattgttgtaaaaacataacaggccagtcacggtggctcatgcctataatcccagcactttgggaggcagaggcaggcagatcacttagggtcaggagctccagaccagcctggccaatatggtgaaaccctgtctctactaaaaatacaaaattagccagacatggtggtgtatgtgtgtaatttgagctatacaggagactgaggcaggagagtcacttaaacccaggagacagaggttgcagtgagccgagatcatgccaccacactccagcctgggtgagagagcgagattccatctcaaaaaaaaaaaaaaagaaagaaaaagaaacaataaaaacacataacataaaatttagcatcttaaatctatttaagtgcacatttcagggccagacatggtggtggctcacgtttgtaatccctggattttgggaagccaacacagcagtatcatttgagccccaaagtttgagactagcctgggcaacatatggagatttcctctctataaaaatttttaaaaatatctaggcatagtgttatgcacctgtggaccccgctatatgggagatttagggaggattacttgagcctaggagtttgaggctgaagtgagacataattgtgccgctgcactttagcttgggtgacaaagtggaccctgtcttaaaaagaagctgtacatttcagggatgttaaatatattcacattgttctgcaaaagacttctagaaatttcacatgttgtgaaactaaaacccaatatccatttaagtgacaagatgccattttaccctctccccagtgcttgacaaacacccttccactttctgtttttatgagtgtgactacttaagctatctcatataagtagaattatatagtattcatcattttgtttctggcttatttcaagtgacataatattttcaaagtttatcttaaaatgtgacaagatttctttgataatatttgatttaattatgaaaacatttgatctttgatttctgtgatatttcattgaatatatatgtttcatttttgatgtgtttataaattaagagacacctgggttgcttctgccttttggcttttgtgagtaagggtacaataaacatggatgttcaaatatgtcttctaggtcctgtgttggatagtttggatatagcttcgtaagagtgggattgctgtatttgataattccattgttaattatttaagaagcatgtataacatttttaaataatggctgcttccttcttttctaccaacaatcagcataggctttattttcattgtatcatcaacagattttgtgttttaaaaaacatgtagtatatttttaaacatatagtatagtggccattgtaatgagattttatttctttattattttttattttttgagatggagtcttgctgttgtcatccaggcctgctgttgtcacccaggcaattggcacgatggctcactgcaacctctgcctcctgggttccataaattctcctgcctcagcctcctgagtagctgaggttacaggtgcccgccaccatgccaggctaatttttatatttttagtagagatggggctttcacagtgttggccaggctggtcttgaactcctgacctcagatgatccgtccacctcgacctgccaaggtgctgggattacatgcgtgagccaccacgcctggcctcatttttatttttatgagtttctctacaaatcattaattttgcttttcttttcaaatggtttttcccatttgaatatcttttttgatgaaaatttagttcaattattttttctttctttggttttttttcttttttttttgggagtctcactctctcacccaggctggagtgcaatggtgcaatctcgacgcactgcaacctctgcctcctgggttcaagcgattctgctgcctcagcctcctgagtagctgggattacaggcgccaaaattactctttgtcttccaccatgattgtaagtttcctgagaccctcaccggaagcagatgctgttacatccttcttgtacagtctgctgaactgtgagccaaataaaccttctttctttgtaagttacacactcaggtattcctctatatgcaaaatagttaatacagtctataatgcctgttttctgttttcttactgatattttatctgaattttctattattgcaaatgatgtcttgatcgccacaattatgttgctatgtatttcttccttcacctttgtcaacgtttgctttatatattttggagcccttatgtcatatgtatgtatacatataaatagatatgatagttacagattcctggtaaattgactcatttgaccgttatataatatcgtgtttgtcctatgctgttacatacaagcatatgtcctatgctgttatatacaagcatattatatacaatataattattaccacctcacccaattgtggttactatttgcatggaatatagattttttcagttctgttactttcaacctatttgactcaatgctaaaatgcctctcttatagacagcaaattgtatactttttaacttaagctactaaggcatcttatttctttttctttttataaatgtatgtatgtatgtatttatgtatgtatttttatttttatttttttgagatggcatctcgctctgtcacccaggctggagagcaatggcatcgatctctgctcactgcaacctccacctcctagattcaagcgatattccttcctcagcctcccaagtagctgggagtacaggtgtagtggctaatttttgtatttttagtagagacggggtttcaccatgttggtcaggctggtcccaatctgacctcgtgatctgcccgccttggcctcccaaagtgctgggattacaggcatgagccgctgcacctggccaatgtatttatttttgagataaagtctcactctgtcatccaggctggtttgcagtggcatgatcacgactcactgcagcctcaacctcccaaactcagatgatctcatttcagtttcttgagtaactgggttgcaaatgtttgccatcccaaaccgagatagttttttgtacttttttctgtagagacagttttttgccctgttgtctaggttggtctcaaactcctgagttaaagtgatcagctcccttggcctcccaaagttctgagattacattatttttattaagtaatttaactaatttttaaaatgactgcttaaagatataaagttactattaccagttttattgttgttctttttttaagtttaatttaatttaattttatgttccaggatacatgtgcaggatgtgcaggtttgttacataagtaaatgtgtgctgtggtggtttgctgcacctattaacctctcacctcggtgataagccctgcatgcattagctatttatcctgattctctccctccccgtgacagaccccagtgtgtgttgtttccctccatatgtccatgtgttcttattgttcaactcccacttaataagtgagaacatatggtgtttggttttctgttcttgtattagtttgctgaaaataatggcttccagctccatctctgtctttgcaaagtacataatcttgttcctttttatggctgcatattagtctatggtgcatatgtaccacattttctttatccagtctgtcatagatgggcatttgggttgatgccatgtctttgctattgtgaatgttgctgcaatgaagatacacatccatgtatcttcataatagaatgatttatattcctttgggtatatacccagtaatgggattgttgggtccaatagtatatctggttctaggtctttgaggaatcgccatactggctttcacaatggttgaactaatttacattcccaccaaaagcgtaacagtatttctatttctccatagcctccccaccatctgttatttcttgattttttaataatcacctttctgactggggtgagatggtacctcattgtggttttgatttccatttctttaatgatcactgatgttgagctccacataaatgtcttcttttgagaagtgtttcttcttgttctttgctcactttttttttttttttttttgagactgagttttgctcttgttgcccaggctggaatgcaatggtgcaaactcagctcactgccacctccgcctcccaagatcaagcgattcttctgcctcagcctcctgagtagctggcattacaggcatgtgccaccatgcctggctaattttttgtatttttagtagaggtggggtttctccattttggtcagggctggtctcaaactcccagtctcaggtgatcctcccacctcggcctcccaaagtgctgggattatagccgtgagccactgtgcccggcctttgttcactttttaatggggttgtgtaattcttgtaaatttgtttaaattctttgtagactctggatattaaccttagtcagatggatagattgcaaaaatgttctcccattctgtagatcgtctgttcactctgatgataatttattttattttatttatttattttttttcagacagagtcctgctctgtcacccaggctggagtgcagtggcacggtcttggctcactgcaacctccacttcccgggttcaagcaattctctgcctcagcttccagagtagctgggattacaggcgcctgccaccatgcccggctaatttttgtatttttagtagagatggggtttcaccatcttagccaggctggtcttgaactcctgaccccatcctcatctaccccctttggcctcccaaagcactgtggttacaggcgtgagccaccacacctggtgataattacttttgctgtgcagtagctctttagtttaattagatcccatttgtcaatgtttgcttttcttgcaattgcttttgacattttcatcatgaaatctttgcccatgcctatgtcctgagtagtattgcctagattttcttcaggggttcttgtagttttgggtttcacatttaagtctttaattcatcttgagttaattttttataggcataagaaagaggtccaatttcaattttctgcatatggctagccagttctcccagcaccatttattaaaagggaatccttttccattgcttgtttttgtcagggttttcaaagatcaaatggttgtagatatgcaatcttatttctcagttctctattctattccattggtctatatgtatgtttttataacagtaccaggcagctttggttactacagctttgtagtatagtttgaagttggatatcatgatgcctccagctttgtgttttttgcctagaattctcttgactaggccaggcacagtggctcacgcctgtaatctcagcattttgggaggctgaggcgggtggatcacttgaggtcaggagtttgagaaaagcctggctaacatagtgaaaccctgtctctactaaaaatacaaaaaattagcctggcatggtggcacattcctgtaatcctagctacttgggaggctgaggcaggagaatcgcttgaacctgggaggcggaggttgcaatgagctgagatcatgccattgcactcctgcctgggtgacagagtgagactctgtctcaaaaaacaaaaagaattatcttggctagatggggtcttttgggttttcatatgagttttaaattttttttttttctaattctgtgaagaatgttagtggtagtttagtcagaatagcatggaatctataaattactttgagcagtatggccatttttacaatattctttctatcttttttatttgtttgtgtcctctctgattttcttgggcagtggtttgtagttctccttgaagaggtccttcacttcccttgttagatttactccttggtactttgttctctttgtagcaattgtgaatgggagtttattcatgatttcgctctctgtttgtttattgttggtgtattgaaatgtttgtgattttggcacattgattttgtatcctgagactttgctgaagctgcttattagatgaagaagcttttgggctgagacaatggggctttctagatctaggatcatgtcatctacaaacagagacagtttgacttcctatttgaatatcacttatttatttctctcgcctgatttccctggccagaacttccaatactatgttaaataggagtggtggggagagggcatcctcatctagtgccagttttcaaggggaatgcttccagcttttgcccttttatatcggctatgggtttgtcatagatcttattattttgatgtatgtttcatgaataccttgtttattgagagtttttaacatgaagggatgttgaatttgttcgaaggccttttccgcatttttgagataatcatgtagtttttgtctttagatctgtttatgtgatgaattacatcgatttttgtatgctgaaccagccttccatcccgggaataaagctgacttgaattacatcaatttttgtatgttgaaccagccttgcatcctgggaataaagctttttgacgtgctgctggattcagtttgccagcattttattgagaatttttgcattgatgtttatcaggaatattgacttgaaggtttgtgtgtgtgtgtgtgtgtgtgtgtgttgttgttgttgttttattttgttatatctctgccaggtcttgatatcagggtgatgctggcctcatagaatgagttaaggagaggcccctccttttccatcatttggaatcgtttcagaagaaatggtaccagatcctctttgtgcctctggtagaattcagctataaatttatctgatcctggactttttttgttggtaggctgttcccgcctcaatttcagaacttgtcattggtctatgcagcgattcaacttcttcctggttcagtcttgaaaggatggatgtgtccaggaatttatccatttcttctagatgttccagtttatgtgcacagaggtgtttatagtattttccgaacattgtttttatttctgtggggtcagtgatgatagcccctttatcattttttattgtttattgcatttttctctcttgttttattagtctagctagcagtctattttattagttttgtcaaaaaaaaccagctcctggattcattgagtttttttgaagggttttttgggtctttatgtcgttcacttccactctgaatctggttatttcttgtcttctgctagcttgaagttttgtttgctcttggttttctcgttcttttagttatgatgttagggtgtccatttaagatctttctagctttttgatgtgagtacttagtgctataaatttccctgttaacactgctttagctgtgttccagagattctgttacattgtctttttttttttttttttgagacggagtctcgctctgaccccaggctggagtgtagtggtgtgatctcggctcactgcaacctccgcctcccaggttcaagcaattctcctgcctcagcttcccatgtagctgggactacaggtgccggccaccaagcaaggctaatttttatatttttagtagagacggggtttcaccatattggtcaggctggtctcgaactcccgacctcaggtgatctgtccgcctcagcctcccaaagtgctgggattacatgtgtgagccaccacgcccggctacattgtctcttcattctcattggtttcaaataattttttgatttctgatttagttgtattatttacccagaaataaagaggagcaagttgttcattcaggaaattcattcaggagtaggttgttcagtttcgttgtagttgcgggattttgagtagctgggattacaggcgcccaccaccacacccagctaattttttgtatttttagtagagatggggtttcactatgttggtcaggctggtcccaaactgtgtcatgactctttatccagcttgcccttctgtgtctttcagttgaggtattcagcctattacatttaaggttagtatttttatgtgtgattttgattctgtccaagtagtgctagctgcttattttgcagagttgttgatgtagttgttttatagcataattgatctttgtacttcagtgtgtttttgcaatggctggtaatggttttttcttcttaaccttagtgcttctttcaggagctctagcaaggcaggcctggtggtgatgtgctccctcagcatttgcttgtctgaaaagaattttatttttctccacttatgcagacttactattgttattttgttaattgttgtatttgcttcttgtatctttgttcctcattttctctttttctgtctttgtgtctttgttgtacttatcttggtatgcttttacttctttctcatttgttttgtgtacttacgcaaacgtattcttggggttaccttggggattatataaaacctctaaaagatacaacaatgtattttaatctggtaaaaaatgaacttcaggccaggtgtcgtggctcacacctatattcccagcactttgggaggccgaggcaggcagatcacaagatcaagagatcgagaccaccctggccaatatggtgaaaccctatctctactaaaaatacaaaaattagctgggcatggtggtgcacacctgtagtcccagctactcgggaggctgaggcaagagaatcacttgaacccaggaggcggatgttgccgtgagctaagattgcaccatccagcctggcgacagagtgagactccatatcaaaagaaaaaaaaaaaaaaaagaacttcagttgcatccaaaaattttttctcattatatctgccttcaaatttgtcattgatgttgctaattgtatattttatgttgtatatttgctaacaaatgtttataatgatttctattcttgtacctttcaaattttagagaataattaatattttttgcactattattataatgctaagaaattccatttttgtgtatgtgcattttttttcccagagaataatgtcttttatatgatgtgttgttttgttgaatcatgttattttcagtagcagcaacggttttcagcatcttttatatgtaaggcatatgaaaagccaatgtactttttcagtatttggttatttttaaaggttttttttctttttacttggaaggacagatatgctgatggtattattctcactttatagctatttttttcaggactttgactatatcacacagtttccttctggcctgcaaagtttttgttgacagttcaccggctatctcataagactatgcttgtaaatgacatgtcgtttttatcttgcagctccattctcttcttgtctgtgactttcgaaattgtgcttatatatgtgtttgttataaatatctttatgtgtatcctagtgtatttgttgagcttcttcattttgacattattttttctttcagaattttttagttatattttcctttacaatttctgtttttggatattttaaatatttttgttattctcattttttctgattttctatagttgtctgtgtccttattttactcattgagtattcaatttattttaaatttttaaaattaatgtatacatcttttttatggtttctttctgaaaatcttataattttggtggagcgattttgccctattttgtattcattgtaatctttgattaatatttggacattaaatatagctacctgtcacattgtttataatgtagctttgtcctggcatagtctgaaaacaattatcttggtttgagatcctgtgagactctcaaacatgttctttgaatgtgtcttgtctaaaattttgtgtttattttttagttaaaggagtttctgtttcatcttaatcagcagtcatttgctgtatctgttccctgtctgtggtactgcagtctctctgttgctgtaacatttacctttggtctcagcagaagtaaactgtaattccaaaatataccaccatttctttcagcactttatgttatgggagaccagtttctggaagggcccctagaagcaagtaatatagatgtatgtgccagtgttttacttgtttattaaaaaagaaacgaaaagttagcaatttactttgaaaggcactatgttgtattgttgagtaggaagaactgtgttgggtaaatgtaacagacttttctttttcttctgtgtctttgcattcctgtgtactcacctgtgtgctcacctggggaactttacacacttgtttataagttgtcctcaaatatattttggtcagtatatttttattagatttatatgtctatgaaggatttagggcctatggtattttattatggcatcttgtttatgtagtttgtataatgtaggttagatttgtaaagtatgtttatcagagtctagtaagttgaataatttgttgtttgtatttctttcagctatgtgttcttattttaccaaagacctttggccagagcaagacataaaagattcttttcaacaagtaatactgagaagatatggcaaatgtgaacatgagaatttacagttaagaaaaggctccgcaagtgtagatgagtataaggtgcacaaagaaggttataatgagctaaaccagtgtttgacaactacccagagcaaaatatttccatgtgataaatatgtgaaagtctttcataaatttttaaatgcaaatagacataagacaagacatactggaaagaaacctttcaaatgtaaaaaatgtggcaaatcattttgcatgcttttacacctaagtcaacataaaagaattcatattagagagaattcttaccaatgtgaagaatgtggcaaagcttttaaatggttctcaacccttactagacacaagagaattcatactggagagaaacccttcaaatgtgaagaatgtggcaaagcttttaagcagtcctcaacccttactacacataagataattcatactggggagaaaccatatagatgtgaagaatgtggcaaagccttcaaccggtcctcacaccttactacacataagataattcatactggagagaagccctacaaatgtgaagaatgtggcaaagcttttaaccagtcttcaacccttagtacacataagttcattcatgctggagagaaaccctacaaatgtgaggaatgtgacaaagcttttaatcgattctcataccttactaaacataagataattcatactggagaaaaatcttacaaatgtgaagaatgtggcaaaggctttaattggtcctcaacccttactaaacataaaagaattcatactggagagaaaccctacaaatgtgaagtgtgtggcaaagcctttaatgagtcctcaaaccttactacacataagatgattcatactggagagaaaccctacaaatgtgaagaatgtggcaaagcttttaaccggtccccacaacttactgcacataagataattcatactggagagaaaccttacaaatgtgaagaatgtggcaaagcttttagccagtcatcaatccttactacacataagagaattcacactggagagaaaccctacaaatgtgaagaatgtggcaaagcttttaaccgatcctcaaatcttactaaacataagataattcatacaggagagaaatcttacaaatgtgaagaatgtggtaaagcctttaaccaatcctcaactcttactaaacataggaaaattcatactagacagaaaccctacaactgtgaagaatgtgacaatacatttaaccagtcctcaaaccttattaaacaaaataattcatactggagagaaactctacaaatgtcaagaatgtgggaaagcctttaagcagtcctcaactcttactaagcattaaatattggccgggtgcggtggcttatgcaaaatggctcccagcattttgggaggctgaggtgggtggatcacaaggtcaagagatcgagaccatcctggccaacatggtgaaaccctgtctctactaaaaatacaaaaattatctgggtgtggtggcacgtgcctgtattcccatctactcgggaggcttaggcaggataatcacttgaacctgggaggtggaagttgcagtgagccaagattgtaccactgcactccagtttggcaacagagtgagactccgtctcaaaaaaaatttatactgtacaaaaaccccacaagtgtgaaaaacatggcaaagcctttaagaagccctcaattcttaacagacataagataatttatactggagagaaactctacaaatcagaaagatgtgactacttttgacaacgcctcaaacttttctaaccataaaagtaattatactggtgagaaatcctagaaatctgaagagtgagataaagcctttaaatggttgtcacacttcattgtaggtaagataattcatactggagaaaacgcctacatgtgtgaacaatatggcaaaacttaatgctcacactttattgctaggaaagcatttatacttgagataaattatacaaatataaagactgtgaaaaagccatcattatctgctcacattttactcaacacagagagttcctgcttaataaaagcattataagtgcaattactgtcaaaagatctttcagaaaatataagcttttttagtgaagagtatttattttgaagttgaacatcacaaatataaaaagggttgtagtgcctttacttgtatcacagatctttttgtagacattttcttctagaggaaaactctgaagcagttgatcaaactttgttcaacatcagggaatttatattgaaaaattgtgcaaatataataaatttggaaaaacaatttttcaaaaactacagcttagaaatcaacagttatactagaatatattttttccagatgcagtaaaagtaaaatatttaatccataattaagtctatgcaaatatcagagaatttatggtagaaatatataaggtactgacacttcagatatactaaatcagagtgctaagtatagaaaatctgaaactaaagttggtagaaaagttatttgtatagaactttaagaggatcagaaggttttttgcagagttataattacattcaaagtatactttatttcttgaaaaatattacagattttttgaaaattgaataatgtcatcattcaactctgaaattatttcctgttgtttcttcattcctattggattcacatgtgaaagcatggggttaattgttgctacatcaaagagagagattcttttgtttgtttgttcgtttgttttttgagactgagtttcactctttcgcccaggctggagtgcattggcatgatctcagctcactacaacctctgccttctggtttcaagcaactcttctgcctcagcatcccaagtagctgggataacaggtgccagccaccatgcccagctaatttgtgtatttctagtagagatggggtttcaccatattggccaagctggtcttgaactcctgacctcatgtgatccgcccgcctcagcctcccaaagtgctgggattacaggcttgagccaccacgcccagcctgtagcatattttaataggagaatacaatatataatagtagcagggttaagtaaggcatccatcatctgtagcatttctcctttgttttacaaacaatccaattctacactttaaaaaaaaatttttaaatgtacaattaaatttttatttaccacagtgttatttttatcgtcataataaaaattatatacgagtataaatgaaattcatttctaaattcttaataaatattttctcatgccaggtgtggtggctcacgtctgtaatcccagcactttgacaggctgagcgagggagtggatcttgaggtcagcagttcgagaccagcatggccaatatggagaaatcccgtctctactaaaaatacaaaaattagccaggcgtggtggcatgtgcctgtaatcccagctactcaggaggctgaggcaggagaatcgcttgaacctgggaggtggaggttgcaatgagccaagatcaccccactgcactccagcctgggcaacagagcgagactccatctcaaaaagtaaaatatattttcaaattttctatatatttttctttgaacatgtggcctgtctgcctgcaaacatatacagacttttagttttgattcatatagagttaaatacatgttagtctaaagacaaatcttaggtgtaagaaaattatggagttaagtatgtgtgtgtgagtatgagtttgtacatattttcagaaggaaagaatgatacgggaacaaaaatcattttaatatggtgactactataaaactaaaaacctaaaaaatgctgaaagcaaatgtatactttttggtttgtattgaatttattactgtacagtctatgacttagagttctgaatcttcccaagcaaattctctgtatatacttgcctggtactcatgctagacccatactttttttgtttcttacattttttttgttttatattttatgaagtattcattatgtgagctggtctgcgattataagaatttttatgaaatttagtgcacacaaaataatctttagatgtaattccaaaagtagtgtattaagttacattttatttagttagagcactccattttgttcttttaagaggagaacaatatataggttttctttagtgatttgttcctttcactttttataattgacataagcatatttattgagtcaatttgttcagctaagtactagggaggcttcattagtcatgaggatgtttttatatataaatgtagcaaacatatattacagttttcactgtgtaatagattatccataataattcataaatattcctgctgaagttagtttgtaacttcaagtcaaagatgaaaaatatcaatggtgaagattgattgttcatatagagaggacattttttttccagactgtaaaactgaatcttgttgaatttaaagagaaattctggcagaggcagatgaatcacctgaggtcaggagtttgagaccagcctgatgaatatggtgaaacccagtctctactaaaactacaaaaatagccaggcatggtggtgggtgcctgtaatcccactcgggaggctgagtcaggagaattgcttgaacccggaggtgaagattggagtaagccaagattgtgccgttgcactacagcctgggcgacagagcgagactccatataaaaaaaaaaaaaaaaaaaaaagagctgggcgtggtggctcacgcctgtaatcccagcactttgggaggccaaggtgggcgaatcacttgaggtcgggagtttgagaccaggtgaccaacatggagaaactccatctctactaaaaaatacaaaattagcccggtgtggtggcgcatgcctgtaatcccagctactcgggagactgaggcaggagaatcgcttgaacacgacaggtggaggttgcagtgtggcgagattgcaccattgcactccagtctgggcgacaagagggaaactccatctgaaaaaaaagagaaattcttttattttctacttctcttcagatttgtcttatgcattttccaactatgtatgcatcacagctattctttttctgagttatagctacagttttcttactgttgtcttcatgccatttcatttcacatggtactttgtagattttgatgaggaagttggtatttttagtgcacacaaaaattggttttaactgtagagtttgcttatcagaacagttaaaaggcagccaggtgtggctcacgcctgtaatcccagcactgagataggccaaggagggtggatcacttgaggtcaggagtttgagaccagcctgaccaacatggtgaaaccctgtgtctactaaaaatacaaatttagccacgcgtggtgacgcacgcctgtaatcccagctactcggaaggccgagggagcagaatcgcttgaacctgggaggtagaggttgcggtgagccgagactgggccactgcacttcagcctgggcaacaagagcgaaattctgtctaaaaaaaaaaaaaaaagataaaaggtgcaatactgtccacaggtaagataattaaattagtcagctttgtttttaaaagaaaaatcttactagattcttatacaaagtgtggcaaatataaaacttgcttgaaaatacagaaattaaatttttaagagagttaatggtaagtaaacaattttaaagttaattttctatgatatacttacagcacaacttatatttccatgcagaatcttttatttttaagtgtgagtgttaaaggttacaaaataatgaaatgacttcagtggatttaaaattttgaaaaataatgtcttttctatattgattttacaatttggagaaatttttcactcattttttatatattttttagtgggagaggtttagtctacagtttttatttttagtcaccaaactgtagccaactcttgggtcattttctctgaaaaacatttggagatcatgacagcgtttggattaaaacatttctgttactttgcatgcaaactagtttactgtgttcacagagtggccagtcatgggaccataagcaacacctgctctttgagtgtctttcataccgttaccatcagcaccagaaactccaggtgccccaagcttaaagtaaaaatcctaaagtacgttggctcctcccatgcaatgtgctgggtccaaaccatgctgttaaatatcagaagtttctatggttatgattaaaaaattaaatgacaataatagccccaaaactatatatttttgatactatttaaccaagattatcacaaagacacagtatttgacacattgttattcttctatgttttataaatattttaatgtgacaggtagaatctgtactttttctgtagaacgtaatattttgaagtatatatatagttaaattattatttctaggtaattaataatttatctcacattggtcagacatgatggctcatgcttgtaatcccagcaatttgggaggccgaggcaggcagatcacatgaggtcaggagttcgggaccagcctggcgaccatggggaaaccctgtctctactaaaaatacaaaataagcagcgtgtggtgacacatgcctgtaatccagctaccctggaggctaaggcaggaaaatggctcaaatctgggaggtggttgttgcagggagccgagattgcaccactgcactccagactgggggacagagtgactatcaaaaaaaaaaaaaactttacctcatatggtgaacatttttgttttgagaccacatgacactgtcatcatttttcaaaaatccaaatacattattatgaactatagtcaccatgttgtgcaataaatctcttgaacttatttcttccatttgactataattatgtattatttcacaaacatgtttccagccttccatttcttataaataacttgcatctgatggtcaccattttactctctacatcaatgggattaagttttttggaatccatgtgtaagtgaaattatgagacactaatctttctgtgccttgcttatcccaactaatacaatgtcctccaacttcatccatgtgattgagaataatagtttttgttttttttttaaggccaggagtggtggctcacacctgtaatcccagctctgggaggccaaggccagtggattgcttgagcccaggagtttgagaccagcctggacaacgtggaaaaaccccatctctactaaaaatacaaaaacaacaaaacaaaaacaaaaaacacctcagctgggtgtggtggtgcaggcctgtaatctcagctactccagaggctgaggcatgagaatcccttgaaccacagatgcagaggttgcagtgaactgagatcatgccactgcactccatcctgggcaacagagtgagactcggtctcaagagggaaaataaggcatttttctcatttaaataataaatagtattccattatgtatatcaaccacattgtctttatttactcattagatgttgaactgtttattctgtattttggctattgtgaaacaagtgctgcaaacagaagtgcaaatgtttctttattcttattttgttttggatatatacccagtagtgcgattgctgtattacctggtagtttttttgataaatctgtattttgtttttcgtaatggctatcctcatttacgttcacaccaacagtgtgcaaggattccgttttcttcacatctttaccaacacttttttctttttcttttaataagagttattctaacaggaatgagttgatatagggattttttttttggcttgtctttttgtgataatagtcaacattgagcatttaaaaatatatccgttggacatatgtatgacttttcttgaaaaatatttatttcagctatttccttttttttttttttctttttgagatggagttttgttcttgttgcccaggctggagtgcaatggcacaatctcggctcactgcaacccttgcctcccggatcaagtgattgtcctgcctcagcctctcaagtagctgggattacaggcaaatgccactgcgcccagctaattttgtatttttagtagagacggggtttttctatattggtcaggctggtctcgaacttctgacctctggtgcccacctcagcctcccaaagtgctgagattacaggcatgagccaccgcgtccggcctattatttttaataattttttattgttgtcattttaaatacacttttgatattaacctcttgtcacatgtataatttgcaaattttttctcccatgttctagttgtcacattctgttgattgtatcagattttgtccagcagctttttaatttgaagtgatctgacttatttttccttttgtgtcctgggatgtttaggttaaatcaaaaaacttgcggccaggcgcagtggctcacacctgtaatcccagcactttgggaggccgaggcaggtggatcacgaggtcagaagttcgagaccagcctgaccaacatggtgaaatcctgtctctactaaaaatacaaatattagccgggcgtggttgcacgtgtctataatctcagctactcaggaggctgaggcaggggaacggcttaaacccagaggcggaggttgtagtgagccaaggtcatgccactgcactccagccttggcaacagaatgaaactctgtctcaaaaaaaaaaaaaaatttgctgcccagaacaatgttatagggcttttgctctatattttggcagtagtagtttcagagtgtcaggccttacatttaagtactaatttatttcgagtttatttttacatatggtgtgagatgagggtctcaatttttatctctgcatgtggatataaagttttcttaattgaagattctgttctttccctttaaagtcacctgtatttaaaatcaactgtaaatacatggatatatttctgctgtttttttcttctgctccattgacctatgtctctgtttttattcaagtaccatactgttggttaccatagctatgtagtgtatttcaaagttagtcacttcttttgtcttgattgctttggctattcagggtcttttgtgataccatatgaattttagatatacttttaaaacttttctatgaagtatatcacgtatttcgatagaggttgcattatacctgtaggtcattttgtgtaatacaaatattaatgtcagttcatgaatagtccatttatgtattaatttctatttagaatgtaaggcgtttcaactttttggttaaatttatttcaaactatagttattgtagatgtaattgtttttgaatttcattttgggatagttattaatgtagagaaatgctgtgactttttgatggtgcttttgtattttgaaagtttaataaattttgtttatttatttatttattttgagatggagtctcggtctgtcacgcaggctcgagtgcagtggcacgatcttggctcactgcaacctctgcctccctggctgaagcggttctcctgcctcagcttcctaagtagctgaaactacaggcgcctcctactacacccagctaatttttttatttctatagagatggggtttccctacgttggccagactggtcttgaactcctgaccttgtgatccgcccacctcggcctcccaaagtgctggaattacaggcaggagtcactgcaccttgcctgtttataatttttaagatttactaaggtcttaggcttttttatacttcagattatgtatagggataaaagaaaattatacaggaataattccttttcctcaatttggatgcctttgatttttttctctaatttctttgtcttggatatttagtaccatgtttagtaagtctgactagagtgggcatccttgccttgttctagctcttagagtaaaagcttacaacatatccctgtttagtatgttgttagcagtttttttggttatatatggcatttattggctgaagtgcatttgttctatacctaattttttcagcgatttatcataagggaatgtcaaattctgtcaaacttctattgtgcatccatttttttctctttgcactctgcatatatttaagttttagagatgtgaaatcacaactaattctgcatacatacaaaaaaagtcagagactactatgaacatctctatgcctgcaaaatagaaaatttggagaaaataaataaactcctggaaacatacaactttccaggattaaaccaggaaggaacagaactcttgaacagggcaaaaatgtataaaatatataatgaaattgaattaataatttaaaaaacctaccaactataaggagccctggattatataaaatcacagccgaattttaacacatatacagagatgagctggtattacttctactgaatgtattactgaatgtattccaaaaaatccaggtggagttccaccctaactcattatataaaatctgtatcgctgcacgaggtggctcacgcctgtaatcccagcactttggaaggccgaggtgggcgggtcacctgaggtcgggagtttgagaccagcctgcccaacgtggtgaaaccccatctctgctaaaatacaaaattagccaggcgtggtggcatatgtctgtaatcccagctactcgggaggctgaggcaggaaaatcgcttgaacccgggaggtggaggttgcagtgagccgagatcgcgccattgcactccagcctaggcaatgagtgaaactccatctcaaaataaattaattaataaaataaaaacctgtgtcatcttgataccgaagtctagtgaagacaacaacaacaaaactataggccaatattttgggtgaacattgaaacaaaaatcctccatgaaataatagcaagctgagttcacaggcaaatcaaaaagttattttgccacacttgtgaactttatatcacatgtgcaaggatgtttcatcatatacaagtcaataagtgtgtttcaccatacaattaaaagcaaaaatttatatgattaacacaatagatgcagaaaaagcattcaagaaaatccagtattcatttatgaaaatattctctaagcaatgatgaaacatacctcacaataataagagccatctatgacaaatcctcagctaacatactgaacagacaaaaggggcatgcatttctcattagaaaaaaaataagactatctaaacaattctatttaacatagttctggaagtgctggataaatctaacaaaatgaaaaaataaatggcatccaaataggaaaagaagaagtgaaattaccttcactcatgatataattctctacctagaaaactttaaggattttaccaaaagactcctaaggttaaaaatgacttcagcaaagtctcaggatacaaaattgatatacaaaaatgaatagcattgccttacaccaataacattcaagctgagaacaaaatcaagaacagttttctttacaatagccataaacaaaaaataatatacttagaaatacatcaaaccagggaggtaaaatatctctacaagaactagaaaacattactgaaagtaatcagagacaattcaaataaaaaagctttctatgctcatggatttgaagaatgaatagaaaatgtctatgctgcctagagcagcctacaaaataagtttttgtttttttatcaaaatgtcgattactttttttttttttttgagacagtgttgctctgtggcctaggctggagtgcagtggtgcgatcttggctcactgtaacctccacctcctgggttcaagtgagtctcctacctcagcctcccaagtagctgggattacaggtgcccaccagcacacctggctaatttttatgtttttagtagagatcgagttttgctgtgttggccaggctggtctcaaactcccggcgtcccaaagtgctgggattacaggtgcgacccaccatgcctggcccaaccccatattatttctggtaacaaagcacagaaacatgatttctcgaattttgctaggattttaatttacaaaagaaaggtgaatgccattaaaaggtgtttaatacactcccaccagaaacaagaggcaaggcaggccctgggggcctcacaaaggcggtcttatgcaagggtgagaaagcagagttatcagggaggtgggactattgctttatgaacgtgatgattggaagcaaaaacgtggggctttttcctattgaatacaaagtaaaataatgaatgctggtgtcagtggttgggaataacaacatttgcaggctcatgagagctgcctgacaaaaagcgtgtaaacaacagtgattgctcctgtggccctgtgattcagcaggtttatggagcagttaagaatcgcagatgtcaaatggccaacacagaatctaacgacatgcttaatacaaattattattagtagaaatgctgaattgcttcatttctgcaatttctgctgcttcttaagatgcttttaatgaataaaatctgccttaaaatttgatacctggtaacttctctctgtgagttttgaattggctgatgtaaccaaaatgccagctcttgccatctaactaccattaaaaggaacttctaaagctccgaagtggtcaacagtttcacttccaacttttttaaaagatacacaattttctaaaaaatttttctttatgggcgattgaatagttgggctttggctaattcctcattagcaatagaattatgtatattttgcaaactctaatacagaacacttaatgtatcagacaaccatgattatgatgtatatacctggtataaacaatcttttttgcatattgaattctgcatttttttcttccttgatacgtatgagattcaccagtaccagtttttctcttgtggtggcatatagttgattgtcatttgcattatctattaaaaacctgtggcagctcatggtattattgaccatatgttctagtgtcttcttgcagatttaaatattttattgcagtgtaaagtttaatatttagatgtgtgatacatctttggataatctgtaattaaattgatcttttgtaatggtgatagtgattagcacacactgaaaatccagcaaagcaattatttttctctttttaactggaaatcatattcgtaagttgtggtagatattatcatcagtgtattcatgattcgatttatattttgtgttatctggttataaattttatatagcattcaatttgacaaaatataaatctatttgatttgaatttaatggtgtgtgtgtgtgtgtgtgtgtgtgtgtgtacttccttgaactttaggaaattctacaaatcttatacagatatgaatgtatcaggcttatattttttgcaaggctatatatacatttcttctgtttattaaaatactggaattggtgttatgtagatatagttgtagatatcagaataaaaatggaatgttgtgaaaattacaacttaataaatatttatggcaaataaatacaagataaaaattatacatctttacaagatagttatttacaattgcttagagcttacctgtccagccaaggcctatcttcttcaagactgtgctgaggcctggcacggtggctaatgcctgtaatcccagcactttgggagaccaaggcaggtggatcacctgaggtcaggagttccagatcagcctggccaacatggcgaaacccagtctctactaaaataaataaataaataaataaattagccaggcatggtggtgtgtgcctgtaatcccagctacccagaaggctgaggcaggagaatcactggaacccagaggacagaggctgcagtgagccaagattgcaccactgcactttagcctgggtgacagagcaagactatgtctcaaaaacaataataaaaagattgtgctgaaattgcacctgcttggttacagtctctactggggagaaataaccctgaccgagaatgatcaaaaaaagaataaatttttggcagaaaaattctctgtgtaaaaaaacagagttgtgtaaaagaaaattatgttcagagaaaaacaaactgaccaattttaccacagttatttttaagaaaataaatgcttcaaagtcaaattaaatttatttaaaaattgcaaatatagtggtgaatgaaattaaaggtctcggtcttcacagagtttacattgtaaggtttgaaaaataaagacaatttgagaataaataattcttcatataatgctggtagcataggtaagttggtactacatcctggaagagggctccccaatgcctatacaagctgaagatacaaatacactttagttatatttgtggttaaatatctacatagttacaaaaatttttcttttaaaaatgcacaagactgtttacagaagcactgaccaatctggaaaatcaccaaaatgttcataaaaagtggaataaagaaattgtagtgtatttatataatggaacattgtagatcaatgaatatagaaagcacaacttgcaatattcacaactttcaaagcaaagcacaactacaggcagcaacagagatctatctcacaaacaatgttgagcagaataagctagccaaaaatgagaatttactgtattaatccatttatttaaagttcaaaaacaggcaaaactcatttattgtataaatagctagaatataagttgctcttagaggaacagtgattgaaaaggagaataaaatgtagcgggatttttaaggaatcagagagaccgatggggtacaggaggatatttattaattatttaggtgcaccggcccagtcagattaacatctgatggactgagccctaaacaaagagttaagttaccttttaagcattttgtggggcaaggggagatctgtgcatggagaagcgtactacagaagcaagaaacaaagacagttattcaattgagacatgcattacatcatttcttacttttcaaggagaaacatgttttgcaacttgagtttatctgtctagtgaccttgcagctgcacagctagggaaagagagtcttcacaatgcttgggaaaggagaagagataaggctcactagccacagaaaaacaggcagttaattcttaaaggactccagctctttctctttctctgagggaaatgggttttgttacatacaactgagtttctgcttatacactctaatttcttttaattcctgttccgttccccactttggtgcatttttataacagaggtgttaatagaaagcaccactatttgccaccttctcacagagctgagctgctccttctggtagcggctgatattttgttaataccatcaactgcacggtagtgtgtcgggttactattgcctctatagttgactgaatactcataataaacaggggtaaaaggcaagggaggatgaggcagacgccaagaataagcaagaacccaccaatgaggattttgaatcctccaaaggttgagaaccatcctccaaacaaggaatctggggaccatccagaccaagtctgaactggaacatgggccagcctgcgcattgtagctatgatttccatgaccgcttggtcattatcatcaatttctaggcaacagttggttcaattaaattttccacatactcctccttctgaggctaagaggtaatctaaagccaatctattatgatatatagcatttctcatttgttttgcttgtattgccaataaatctagtgcccttgatgtttcattggttataatttctaggactgcctgcaaccttatgatgaggttgagcatatagattgggttgtggtacccctgtgacccatcttgcgcccaggtagctggcccataatatttcgtgattcaggccattcattttctttccagtttcctatgtccacatcgtttttgatatttgtgtctatttttgtgattatgcttcttctagttcttcctttatttttatcataaactggatatcctaagagttcctgttgctttagaggaattagaaggatggcttgactgttcctaacacacatgcccctgtccatttagctagcagtagctgatatgcctgtgctccacagatccaatacaggccagagggtgcctttcaagcatttgcagcctctagctgatgccaagagtggcttatagtagacaatcaagagaaagggtttggatctggtaagtaggagtcagtctgggtgtttcttcatagttttgtttttagtctcatcataatactgttgccctaggcaggttgtttctcctactgcctctgtgaaagcctttccccattgagcgatacaataccttccaattatggaggtttttaacaaccagacactggcaaaggctgttggttcactggcagggttaagcgaagtgaagttatcttatggtattaattattttgcctcccatggccactagtcccccatattatttcctccacatacacagcatgaggaaattcctaagctgccagctatgttttcagctagttgagcaaataagtgttttgttgatgggggaaactcaggcactgtctgatcaaaatgcttatagaatgacttatgggcctggaattgtgaggttggatgcatttgagtccatctagtctttttgacaattagtagtggaattccaaggcctgctctttttctatgaactcataatagtgctgtctgtcctgtagaacaaaaaggtagctctggctttaagacagtaaaatttaaaggattgcatgttcttgtcttacaatctggtttgtttgacataccacttagcagagcagtccttcctgaataaaggtgttggagctgtatttgtgtagaccatggaatgttacagtctgagcatctgatttgtggttctccatacagatgtttaggactgctgctaagcctctcttgtgtcaaaccactgcagactccttctgttttttttaggatttgaacatatgcagcatggcaggcatcaaagtacaaggaaataggctctttataggagggaggggcttctttggttcaagctataagctctccttctttttctccctctgatttaatatgtacctcaaaccagaattcatagggtaagagcttagggtcataacataaatatagctgattatttcctgggtcacagactgaataggtggtctggttgtatgtgcaggttcctaacttggttcctgtacattcatagtaggtatggtacagtagagttttaactatggtattcgttacccaggtagtatgtacacagtgtgagcatccttctagagatttctccccttttagtataggcagaaatggtaacaacatcagtgtatgtaatagaaacatgcttatactacacatgtgcatggcaaaccttcctctgggcatagatatttgctgtaataacataacaacagaacaatcagtattgacagaattataactaggcttataaattgtatccacatttacttatctggagatggtcctcttagcttcagctgtgcatagactagtcagcttctgggatgtgactagagtagagcttgcaggatcctcaagcttcagccacgcgtagactgaccagcttccactgtgatcagagcagggcagttgtccttcttactggtggttgcgtttcgccgtaggactattcaggcggggtgatctgtgtcttgttggctaattcattggtcattgtcaggagtcactgctgccactggtttcggctggctatggtgaatcgaaggtgtgacacctgcgactttaacagcagtgggagtagacataattacaatatggggcccatcccataagggccccagggttgttggattccaccttttaacccagacagagtctcctggcttatgtggatgcactacatctcttagacttataagtatcctttcccttacccagccttttacctcctgcattgccactcctcaagcctgcatctgtgttctaagggttagctctcctaactcctttaaatgccctctaatttgattaatgattgcgggtggccttctgaacaatatttcatagggcaagtacccagtttgttttgtaggtgtacacctcacctggaggaggaccatgggcaagacctgatcccatcataagtgagtttactggcaaaattttttagtagctgtttgagtgtctgattcatccgttccaccttctctgaactctttggtcagtaggctgtgtgcaatttccatttgatctttaaaagttgagtcaactgttgtactacttctgccgcaaatgcaggaccattgtctgatcctagggttaaaggcaacccaaaccttgatattgatgtcttttagtagcacctttgtcacctcttgtgccttttcagttctgatggggaaggcctcaactcaccccgagaaggtgaaacaaacactagcatataccagtaacctcctgctcaaggcaactcggtaaggtctacaagcaggttctcacaaggcacagctcccatttcctgaatttctgggggtcgagtaggtccttgttttggattagatattgttcgcaggatagacattgttcgcaaacagcacgggtgatggcagagagccgtggcacatagaagtgttgacctatcaaagtctctagggccgtgcttccagcatgtgttccttgatggatctgcttcacaaaccttggggctattgtctctgggacagctagcctcccatcagagaacagccaccatccacctttaatatattttcctgtttcctggccaaaccaagctttttcaattgaagagtaattgggtacctctggcaaagggggctctacaaagagaggcattgctagagttatttcttcaggtaaaaccttgctcattgctgcccacctaacttcttggtctgccctcctgttgccctgtgcctcatagcttttcctaatttggtgtcctttgcaatgaatgagagccaccttctctggagcccatatggcttctaataattgcaaaatttcctctttattttgtatttcttttccttcagtagtcagaagtcctctctattgtatattgccccatgggtgtgcagggttgcaaaagcacagtttgagtcagtatatatgtttactttttccccttggccaataacagtgctctggataatgctattattaattcagccttctgagcagaagtcccagaagttaaggcttgagcctcgaccaccgagcgttgggtcactactgtataccctgcatatcgcaccccatttgttatgaaactgctaccatcagtgaagtattcaacatctgggctctccaagggggtatcccttagttcttcctagctcgagaacattttgtccactgaatacagtgcaacagtggggaaggtcctgccagcagtgaggcaacccaccattcttcaaagtgggctcctccacaggcagcagggtagctgggttcaagaaatttacagtctgtagtgttatctggaaattttacacagaaaactttgacactttagcattctaaagttggacaggcaacgatgtcctctttggtccattaaggagactacagcatgtggcaccccaatttttaacttctgtcctagggctagcttgttggcatcttctatgaggattgcagtagctgccaatgccctgaggcagtggtgccaacctaaggccacctagtccagtcttttggataagtatgctaccagccaatgtaaagagcccaacaactgagttaagactccgactgccattccctttcgttcatccacatacaaaagaagggtttttcttacatctggcaacccacatactgaggcctggatgagagcttcctttatatccttgaaggtcttttcttgttccttttcccataggaggggctctctttccctacctctggtagcctcatgtaagggccttgctataagggagaagtttgaaatccagattcggcaaaatctcaccacccctagaaattccctgacctgctgccgccttgtaactgggtggacaatgcacatacagcctccttgcgtgcacttccaagcctgcattggccttgggatactatgaatcctagatatgcaacctcccaaaaacagacttctgccttgtccttgaacactttataaccagcttcacacagcaggtcgaagcctctctgttccttggaggcattcctccctcttaggggcagttaatagcaagtcatcaatgtattgtaatagcacagaattgtcactagacggcgcaatagcctcaaggtcggtagccaaagcctccttgaagatagtgggagaattcttaaacccttgtggcagccttctccgggtatactgcgattgcccccactggaaggcaaatataggctgactttggggaacaagcctcaagcaaaagaaagcatcctttaagtccagacatgtgaaccccgcggcctcagcaggaatatgtcacaacattgtgtatgggttgggtactgtggcatggatagtggcagtggtcttgtttaccacctggaggtcctacactggcctgtattcaccatttggcttgagcacgggcagcagaggagtattccaagaggacttgtatttcactataatctcatgttcatagagctgatttacatgttttgttatgccttcagttgcctctctgggtaatgggtattaacggactcataccagggtagcatgagggttaagctctactaccaccgggggtctgtttagaacaagtccgggggggttgtcctcagcccatacacctggtaccttgaaaagcattccccacgtattgtgtaggtccagctccagcagcctcctggtacacagttcatagagccgccattcctcagctattaggagagctagagtcaataccattgcctttggcttccctacctccagggtcatattcccattaggtgtaaaggaaatttgtgcctgtatagtttctggagtaagtctctccccaacaagggcactggacaatttggcatatatagaaactcatgctgcacttcttgtcctccaataacacatctcctggatttgcaaaaaggtcccttttctttggccccagtagcccttacaatagtagcacagttctttgtgggggggctaattgggtgagttaccacagagaaatcagctctagtgttgaccaaaaaatccattgatcagccccctatttccatagaaaccatagccaccccccgaccccagggcctaaaaagatggaacgcggtctctcagtcctcaaaattcttggcccctgctaagccaatcagatcaggatctgcctttgaggcaccattactagcaacagaacgccgcactcgggtgttagactattgaccatcatctccatcctttgcctttttgggacactcatctttccagtggcctatttgcctgcactttgcacattggttcctgtccaaaggggacaggctttcctctcccagtcatgtctgccctcttcctcagcctctgctttgaccacgccctctagcaaatccaggtttactttctgctagtgaagcagctgtaaattgaaccgtgtctttatttctgtttctggtttttctttcttcctttctctctgcctcttcttcccagtttatgtatactttgtttgctatttccaggagttcactagtatttttccctgcaaagccttccagctgctgaagcttttgtcttatgtctccctgtgcttgcctgacaaaggtcatatttatcatgtgttggttttcaggagcctttggaataattggagtgtacagcctatatgcctcacaaagcctttcaaagaatgcacttgggctttcatcaggcttttggcgcatttctgacattttactcatattcattgcctgccttcctcctgcttttatcccattcaggagtgcctttctatatagccgcagccattccatgtcccttgcctcatttgggtcccagttagggtcctcatttgggtaacgctccaaggcaaactggcatgggttagggatggcctctggggcttccccttctaaccagctgagagctgcctgattaactctcctacacttctctgtattaaataaagttagcaaaagctgttgacaatccggccaggtcaggttatgtgttataataaaagcattcaccaaatcaatgagagcctgaggcttttctgtacaggaggggtatgctgtttccaatttaagagatcagtagtggagaaaggctgataaacataaagcctagggttaccttgtatctgcccctggtcatcataaacttgtgtccttgtctcttgaattggcatctgcaaagcccatggtaggccttagtggaggcacctagctgcctcaccctgtccatcttccctgtttttatctaataggggcttctttttctctgggtgggggagactgagcctcactttcctctgaatccgactctccagatgctcctgactctgcctcctgccttactctggccaaagatgggtagactggcacatatgggggtggacattccctttcctcaggtgggacctgaagaactggtttcagctgaggctttggggattccttttcctaggagacactagaagctttaggtttctctgttttactttggttgtgctgcctgagccactaatgccttgcaatatccctctaggcagggctgtcaccacttggggcgagtttgcaccacattgagccaagagtctatatagggaaactggtctgggtatcctggttgtcctgcaactccagtgaccaccttaaacacacggccaattaattccctgtctattgtacctttagagggccaccccatattgaaagcaggcccatctatctcacagtatgtccttaacctttgagcaacaagtttcatcccataatcacctctaaatccttttttaaaattctttatcatgcactccaaaggagttggtttcaatgctttccctctcatttcctcccttgcagtgcactttcactctcactttcactcacaggtccaccagaccaggtcctattatgagagttttggatgctgcttagtcaggaacatgccttcccctgtcacagcctgctgcagctgtgaagctggtcctttcagccgtatgcagcatcctaggtctgatgtcccctgcactcatgtcagagcacacagcccatgctaagggatctctgcctccccatgtcactccccgcactggcctctcctgagaccatctctttcacacactttcacacacctcccctgccccaagattcctcactggatgaaactagcctgtctcatgtcctgggtgagcctctctcatgtcctgggtatgttcacgtgcaccctcaacactcccagttggggtggcaagccactcttgccaccctgccagcaagctctaccttgctgcacttgctgctctattggcccatttcctcatttttttccagttccagtgttagtggggacttgaggtgcatccaaattggcaagccactcctgatgcccccagccactctgggttggattagtgttcattctccgggaggtgatcaagctccccttcatcctcatgggatgggctttgctgccttgggcactttctctttactgcagttcctgaagtgctggtatcatcctgcagccccattcccagttccattgcactgccaggcagggtgtcagaatatggggagagctggtttctatccagttgaagctcccctgtggtgtgccttggatgctgggtctctcctagccccagagctctagtctcacaggcaaaggagacagtaaatctgtcatctccaaccccaggcaagccccccacccccaagaaatgtagtgggatttttaaggaatcagagagaccattggggttcaggaggatattcattaattatttaggtgcaccagccgtcggattaacatccaaaggactgagccctgaacaaagagttaagttaccttttaagcatttagtggggtggggggagatctctgcagagggaagcatactacagaagtgagaaacaaagccagttattcaattgaggtatgcattacatcatttcttacttttcaaggagaaacatgttttgtgacttgagtttgtctgtctagtgaccttgcagctgcacagcaagggaatcagggtcttcacaatgcttgggaaaggaggagagataaggctcactaaccactgaaaaacaggcagttaatttttaaaggactccagctctttctgtttctcaggaggaattgggttttcttacatacaactgagtttctgcttacacactctttaatttcttttaattcctgttccaaaaacagggggagtgcccaggttgttcacactcttccatcactgcatgctgggttcctggtatatgcattgtgtaaacattcatcaagctgttcttttataatgtatggatattttgtgtgaaattaaaaacatacctttttgattttttatttatccttttttatttcttcttcagtcactttttgacacatacttttctggaaaaataattttatctaaatttttaaatttaataacataaaattgtttaaaacaatatcatgtttaaatatttttattattttttttttgagatggagtcttgctctgtaacccaggctggagtgcagtggcacaatctcggctcactgctacctctgcctcccaggttcaagcaattctcctgcctcagcctccaaagtagctgggattacaggtgcatgccaccacgcccaactaatttttgtatttttagtaaagatggggttttgccatgttggctaggatgttctcaatctcttgacctcgtgatccacctgcctcatcctcccaaagtgctgggattgcaggcatgagccaacgtgccttaatatagaaggtatctaaaataaactacagcaaatgtgcatgataaactattgagatcataaatattataaggatgctactgtcaagatttttattaaacattggatttatggtcccagccaatgcattaaaatgagatcagttttacaactatactttaaagtataacaagtcaataatctagtacctaaacaattggttctacctggatagattggattcccacacagcaactgacacgacaatttttcacatagattcagaatttaaaacttttaggagaaaatacaagataatattgttgtgataactgtgggtgtaaagcaatttcttaaacatggcacaatataaaaacttgcataaacatatttataaattagatgaaattttaaaaacttttgattatcaagaacttagaaaaacatgtttgaataaagatggtggaaaggcaaatcataaccaagaaaaaatatgtaaaaaacacatattacaaaaattagtatttagaaaatatgcactacagaatatgtattaatatacaaagaaatgaaatacattaaaaatggacagatggcacatcttaaaacacatatgaccaattaacctctgaaaaataccaatttatttagtgactatggaaatgctaattaaaactctaaattatatacttttctgattctccattttgtcaaaaaatatgtctagtaattccaagagttgataaaaataaagtaattggaattcacaaataaccactggcagtagaattcgtttataaattgatgtatattcacactgcggcagtaaaaatggacaactatagctatgcaaagcaacatggaaaaatagaaacaattgtaaataaaaaagcaagtcacagatgaaaacttgtagaattgatctaaagtcaaaaaacaagcaacactgaaacgtatattgtttatagataaaattgcataaagtaggccaggcaccatggctcacgcctgtaatcccagcactttgggaggccaaggtgggtgaatcacaaggtcaagagatcgagaccgtctggccagcatggtgaaaccccgtctctactaaaattacaaaaattagctggacatggtgttgcatgcctgtagtcccagctactcgggaggctgaagcaggagaattgcttgaacccagaagatggaggttgcagtgagctgagatcatgccactgcactccagcctggcaactgagcaagactctgtcaaaaaaaaattgcttaaaataaacgacaatatgaaattcagatactggtcacttttgggttaggaggttgttttttgtttgtttgtttgtttgagatggaatttcactcttgttgcccaggctcaagtgcaatggcacaatctcagctcactgtaacctatgcctcctgggttcaagtgattctcctgcctcagcctcccgagtagctggtattacaggcatatgccaccacacctggctaattttgtatttttagtagagatggggtatctccatgatcatcaggctggtcttgaactcctgaccttaggttatctgcctccctcagcctcccaaagtgctgggattacaggcatgagctactgtgcccagccaggttaggaggtttataggaaaattcagaggtatccacttctcaggaatgcgtgatgattttatgaagttacactgaaagtttcatgagagtagagaccaatactttcttttctattttattttctaaggctgccaaaaggatagcatattgtgtgtggtcaacacacatttatcagttaaaagaatgaatacatacatattctttgtaaaatgtgaaactatgcaaatcaagattttattatttttatttcctatagttaacagaatcaaatagaaaataataaagtataaaattcagaaagcactattgaaagtttaatgttaacctagcacttgcaggtaaaaatatagcaaaatttttagtttccacatttgtgaccattataattacatcaaaattgccccatgaggaaagaacatgaaatctgacttcagtagagcacaatttaagaggaaaaagctgaaataaaaagaaaaagaaaagaaaaatataaaaatttgattgggtcaaatctctaagttattctccataatttttttttttttagaaaataatttttacctctgcttgtgcagagtgaggctggctggtggaacctaggcccctctgtcccccccaggtggcagtggctgatctctggtcaggcatgaggggtgcctccatgtatgagttcagtcagggtgtggaaaaacttatagagaaagatgcaaaccttcttggaaggccaggaggtttttgcaaatcttcaggaaggaatgagccaaaggtggctgttctttcccagcggtaattagacagatgtagatacaaaggaatgtaggggagcttatctaaagaccttgtttgctcatgttgtcctaagaccgacctttgatcatttgtgggcagaactgctctctactgggggattgacaatgttaattacccactaatagtgtttactcgagacttttgtcatttaatctgtaataaatacatgtaaacttcaccggcttatggaggtgggtgctgctcattctgttagcacagcctcttagctgcagtgacaggcaaaatatctgtgtcagtgtacgtctttcatccatcactgtgtcagggtctgtgggtcagacctggcactgccacgcactgggcctgaggctgcccagcccagctgctcctcattcccctggactcttccatggtatctccaagcccctgcatcatcctatctgtctctctgatgaaaggtgaggtggcagcacaaagatgatggggaaactgccccacatgccgaggaaagcttgcccagctgcacgaaatgctctggttgatgggtttctgcgcaccaagctgggccatgaccaagggttagagtggaggcgtaccagggtgagggtgctttggctgctgcaggagcttccctgctggcaggaggcagcaatagccatggtcattgaaaacaaggctctgctgataaatctcagacaccaggatcagaagaaaccagagaaactgctggagagcttgagccaaatggacagactgttggagcagctgagggtgaagctgcatgaacatcaccaaggatagaaatggaaatgatgaaggagtctgggaaataaatgatagaagataaaatacagccgtgaacatggtaaggtgatgacgattctggtccattggatcccaccatctccaaggcagtaaatctcatcacagtcaccacccagcaagttgccaccacagcattttctgtttgttcctaaataaataaaggtgattctcatcacaagggcaaatacaaatagtggtctattatgtttttaactaaactgtaggggtttcatttactttttctaagttctcataattttgaaaatgcggttgtcatatatatggcttaagaagtttttgataggctaacgttacttgaattgttcaaaaaccactatattttaaattaagaagaataaacaatgtatttgttttatatatttaaagcttagagtcacaaataatgctcctgtttatgatttgaaaactttaaagtttggttttccatctgcatgtacagaaaacattgcatcacaccaaaacatgtgttttttaaagtggcagtcataattcctgtctgtctggatatattttggacttttctatgttaagcataacataagaaagaaatttcattagccgcgcatgtaggcttacgcctgtaatctcagcactttgggaggctgcagcaggtgcattgtctcaggtcaggagtttgagaccagcctggccatcataatgaaatcccgtctctactaaaaatacaaaaaattagctggacatggtggcagcacctgtaatcccagctactcaggagggtgagtcaggagaatcgcttgaacccgggaggcgtaagttgcagtgagccgagatcgtgccattgcgctcgagcctgggcaacaagaacaaaactccatctcaaaaaagaaaaagaaaaaagaatttcattttgttttaggtaatctaagattgttgtacacaaaaaactttatatattatggtagggttcaggaaactatgtatataacctaacattaatatcacttttttaattttttttatttttttatttttttttagtatttattgatcattcttgggtgtttctcacagagggggatttggcagggtcataggacaatagtggagggaaggtcagctgataaacatgtgaccaagggtctctggttttcctagacagaggaccctgtggccttccgcagtgtttgtgtccccgggtacttgagattagggagtggtgatgactcttaatgagcatgctgccttcaagcatctgtttaacaaagcacatcttgcaccgcccttaatccatttaaccctgagtggacacagcacatgtttcagagagcacagggttgggggtaaggttatagattaacagcatcccaaggcagaagaatttttcttagtacagaacaaaatggagtctcccatgtctacttctttctacaccaacacagtaacaatctgatctcttttccccacatttcccccttttctattcgacaaaaccgccatagtcttcatggcccgttctcaatgagctgttgggaacacctcccagacggggtggtggccaggcagaggggctcctcacttcccagatggggtggctgggcagaggcgccccccacctccctcccggatggggcagctggccgggcgggggctgccccccacctcctggacagggcggctgccgggcggaggggctcctcacttctcagacggggtggctgccgggcggaggggctcctcacttctcagatggggcggctgccaggcggaggggctcctcacttctcagatggggcagccgggcagagacgatcctcacctcccagatggggtggcggtcaggcagagacactcctcagttcccagatggggtcgcggtcaggcagaggcgctcctcacatcccagatggggcggcagggcagaggtgctccccacatctcagacgatgggcggccgggcagagacactcctcacttcctagacgggatggcggccgggaagaggcgctcctcacttcccagactgggcagccggtcagaggggctcctcacatcccagacgatgggtggccaggcagagatgctcctcacttcccagacggggtggtggccgggcagaggctgcaatctcagcacattgggaggccaaggcaggcggctgggaggtggaggttgtagcgagccgagatcacgccactgcactccagcctgggcaacattgagcactgagggagtgagactccgtctgcaatcctggcacctcgggaggccgaggcaggcagatcactcgcggtcaggagctggagaccagcccggccaacacagcgaaaccccatctccaccaaaaaatgcaaaaaccagtcaggcgtggcggcgcgcgcctgcaatcccaggcactcggcaggctgaggcaggagaatcaggcagggaggttgcagtgagccgagatggcggcagtacagtccagcctcggctttcacaactttggtggcatcagagggagaccggggagagggagacgagggagagggagacgagggagagggactaatatcactattttctgatgtctatatttttttagaacttttttatttttacaaatgtctccacaaattctaggatattttataaaatagcagaatactaaagaaatgggtggtttgccatactatatgaatactggtattcaattaaaataacaatattttcatcaaaatttagacagtagatttaaatttcttgatttttcactacagtgatagacattcataaatatttcagaaatcagagctgtattaggttttacttagtagtaatatgtataaaagatcaagaatctgttcaaaatagatatttctcatcaataatttgatgctttcaaatacccagaagttttgttttaatcagatgaagtctgaggatagtttactagttttattttttgtatgatgtgttcacaattttctaatttaacctaatattgataatggtatacaaatcaacttttttttcaaatctcataagtctatttattatgttgttgaagatatttttagttaacattccttctttcagtattttttacaggaatttacatctagtcaaatttgcttaaactgttaatcagtgtcaggtgccagattccaattcatttttagtgtgcctgtacttttctttctataacctctgaactaaatttatattgcttaattaaatgtgatataatacaactcacatatttaaaacaaaaccaccaggtaaaatgaattctggcttagtataaagaagctgttaccaaattagtgtcacatatacagatggatgtggctcaacaaaattttacacaaaaatatttggattgaactacacgtgttgccatgacttagcctctaatgaccttataaataaagacaaattaatacacatttattcattttctttcattgtgtctaaaggtagcatgtcaggaaatctcatgctactgtctgaaaaaacacattctactgttacctaagaaatcaactggatggcatttttataaccttgcaccacataaggaaaaactgcaatgtagtctgataaatgcagactccatcacatggaaaaggataatccagaatgccactttcaatacttaagtattcaaccttttggttgaaaaatgtagtaaaatagagctcttggtaagttttgtgtagcttaacatcagcataaattaggaaaaaatatcttttaaaatgtaaacaaacaaaaacctacaccaaaaacaaaaacattcaccaatgcatacatattgactgacgctccagggacataaaataatttttcctgggtacacagctagtgacccaaatcaagctcaaatgtgtgattttaaaaatttcattttcccacttttgacaatattgacataacagcgaaatcttactctcagagttgatagttgaaaataaactaagacaagtactgttgagggaggctaggtagccaagaaggtcaccatgtccttgggacatgcagcaggcatggcgattgcatagtgacagcatattggcaacacaataagccccaacatttgcattgtatttcagctcactgaagcacagctctcttcagtagggaagagagttctttactcccctgtaaagaacatgcacattttgattttacttgtcctctgaccttttactcattataatagtaaaaaacacacaagtgagtggagattaaagatgctaataagatatgtgacacataagcatgtacagccactgtgtatgtacaccaacaagaccactcagaacatgctaactaataacaccactttccacctcttcataaataatgatctaagactcccatagatggagtctctctagttccagtctttgctgtctcattcttataagcagcccaccctgaatcccttctctcttggggctattttgcacctaatttttaaaatagtatttcaactttgcaataaatccctctatgttgcatcttcattgttttgtgtctcttgtttaaatttttgaaactaagaaccaaggtctcacaacagccatcaacactatcgtgctttgttttgtattcttcattaacagtatttttgggaatatgtcaatatctacattttaaacacagcccaaactgctaaattaaaaatttaaatgattgtaaaagcatgtatatttttcaagtttcagcttcattacactttatgtattgaaatttttaaaaaattctgccaggcacagtggctcacgcctgtaatcccagcactttgggaggcagaggcaggcagatcatctgaggtgaggagttcaagatcagcctgggcaacacagtgaaaccccatctctactaaaaatacaaaattagctgaccatggtggcatatgcctgtaatcccagctactcaggtggctgaggcaggagaatcgcttgaacctgggaagtggaggttgcagtgagccgagatcgtgccattgcactccagcctgggcaacaagagtaaatctccatctcaccaaaaaaaaaatttaaaaaaataaaaaatattgtgacacaaatatatctgtcaaatttaatatcttacgtaataatttgaattcacttccaaaatgatttatattcatttattgttatatttacttttgaccaaatttagctttccaaactaaataaaaactgaagcatgttttcaaagtttcaaggaactaaagtttactggcatcaaattctctgtagtaaaatgaaaaaataaaaccatctttttatcaataatattttatatctgagcacttaagcatcaaggacaggattttggatgatgttgagtgaatatctaaattaatgaagtagaaaataattatcagaatagaataagtgatggatacagaaacagagcacttgacaaaaccattcagggtatgtttgacaaacaagaagattgtataggacctgcactgcactgcactactaatgtaaagcgttctctgtaactttagtctttattctcaagcttacaaccaccacatactcacatacacagaataaataagattagctccttttcctggaaggcagtgattcctcttttattctattacgtctgttccatattgctgtgataatgctgttgaagtgcaccctgttacaccagaagatcacctgtgtgaatgtgaatagactgacactggagaggaccagctcagcaaacacatttgaactgcctctttgcatttcaggcagttaaaaatgcctttgaagagtgaaaataaagttactgctgattaagcagagagtttaacatggaaaaacgtttttcaattgtttaaaaattacaatgcatggactacaacttttaaaatgtaaaatgcatcacataatactgcaaaaaaaaaaaagaatagaaatgatagggttggccacaaaggacagccaaagctgtattatagcaatatagaaaaatacatatctactgccagaggaaggtaacttgaagtatttgagaaatgtactctaaaaatctaaaattgtttttagtattagtttctataaaaaatgttccttaagcattttgaatttttgaaaaagttaaatacatgctttggcagtttagcttttctgaataatttgaatagaatagaataaatacatatcaaaatattaatttttctggtaatggataactttcagactaaaagagttaaactttacaaaattgtatgccgatcaatttgatcagaagcctctttcttggaactggaagagatgacacaaagatggtgctttcatgttgggtgggagagaaatggttaccaggggctacatcatagttgtttcactaatgaacattgattttcattgctattttgtctaaattatggtaataattaatggcctcgatccaaaaaattttcttaaaacttaagttgtcaatcagccataatattaaccaaaaatgcattaaaatgaaggtatttaagttataatttatattttcaaattaaaatacttctggaaatctttaaggttttctaggtagagcattatcagtgaagataatttaatttcctttttttctatttagatgcttttaatttctttattttcttggattgttctaactaggatgtctaaaattatgttgaataggagtgttagaatggatatttttgtcttatttttattctaatggagaatgcatgcagctattgccttttcagtataatgttggctgaggatttttaatacatggctcttgctattttgaggtatgttttgttaatggtttctttgttgagaatattttcatgaatgaatattggatttccttgagtgcattttctgtgtctattgtgttaattgtataattttttaattatctgtacatggtgaattgcacttactgacttgcatatgattaaatatctttgcataggtggaattaagctcacgtgattgtggcaaaacgttttgatttgcttatgaactcagattgctcgtatttcatggaggatatttgtttcaatgtttaccaaaaatattggcctgtagtttcctttttttgttgtgccttcactagattttggtatcaagataatattgattttataaaatgagttagggtggaattccatcctgattttttggagtacattcagtagtagtacgagctcatctttgtatatgaggtaaaattttgttgtgattttacataatccagggcttttatggttggtaggttttttattactaattcaatttcatcatatatattttatacatttttgccctgttcaagacttctgtttcttcctggttcaatcttggaaatttgtgtgtatccaggagtttatttattttcttaaaattttctagtttgcaggcatagagatgttcatagtagtctctgatgattttttgtatatatatagaattaattgtgatttcacatctctaacatttaaatagatgcagagtacaaaagaatagatgcacacaatggaagtttggcaaaatttgacattcctttatgataaatctctgaaaaaatttgttatagatcaaattattggcacctcagccaataagtgccacatacaaccaaaaaatgcacaggtaacaacatactaaatggggatatgttgcaagattttactcaagagctagaacaagacaaggatgcccactcatccttgctaaagtcagtcttactaaacatagaatgaatctaaggcaaagaaattagagaataaaatcaaaggcatccagattggacaaaaggaagttaattattcctgtgtaattatcttttatccttatacataatctgaagtatagaaaaccctaagactggctgggtgcagtggctcatgcctgtaatcccaatactttggaggccgaggcaggcagaccacctgaggtcaggaggatcgagaccagcctggctaacatggtgaaacccaatctcaactaaaaatacaaaaagaaaaaaaaaaaagttagccaggcctggtggcacaatacctgtaatcccagctactctggaggctaatgcaggagaattgcttgaacctgggaggtagaggttgcagtgagccgagatcatgccactgcactccagcctgggtgacaaacgtgagactccatctcaaaaagaaaagaaaagaaaagcctaagattttactaaaaactattaaaaataaacaaatttattaagctttcaaaatacaaaagtaacatcaaagtcagtagcatttctacacattaactatctcaaaatgaaaattaaaaaacaatttcatatacaataactatagtagtaaattcaatacaaagcagagagtatacatttgctttcagcatttttgaggcttttagttttatactagttaccttgttaaaataatttttccaatatttcttatgaaaataagtacaaacttatactaacacagacttacttactccatcatttccttacacctaaagtttatctctacagtaatgtatatttaaccctctgtatatcaaacctaaaagtctgtatgtgtttgcaggcagacaggacacaagttcaaatatatatatgtttaaaattttaagatatgtactcagaactcagaaatgtatgtatttaatttatacttgcatatgatttctataataaccataaaaatatcccagtagtcaataataatttaatcgtactttattttttatttctttttttgcttgagatggagtcttgcagtgtcacctgggttggagtggagtggtgcaatctcagctcactgtaacctccacttcccaggttcctggccatctcaaactcctaatctcaggtgatccatccgccagggcctcccaaaagtgctgggattacaggcgtgagccactgcacccggccataattgtacattttaaaataagtaaaagtgtacaattggattgtttgtaatacaaaggataaatgctagaggtgatggataccacatgtatctcgatgtgagtattatgtattgtatttgtgtatcaaaatatgccatatatgccataagtatatacactcatgtacccacagaaattaagaaaaacaaattaaatgattaagaataaaaatttaacctacaggaacaatattctttaacttatttgcagtttaaagccactggcaaaagagatgactaaagatgttagtccattatgttaccaaatagtatattgttaacattttttacctatatttttgggcaaagtggaaaaggttaatctttgtggtaaaataacacttcattgaatgcacaatagtatttaacatgttaaaaatgttgaaacgattaacttcacacataatctaaaatttttaaaatgtactgcattttatcatataaaagtacaattagtacaatatatgaataatatactactagttttctcgtaatgcaaagaatatcactcttaacacctacctcgtgcatcactcaatagtgtaagttaaccacaaagaatctctccacttagattttcatcatgcatcttacattctaatatccttacttgtacatagaaaagatcataaataatgcccacctaatgaaaaagaatctctcatacctttgatgcagcaagaaatgatcacaaactttcacaagtgaataagaatgaagaaacagcagaaaataatgacagttgaattacatcatttgctttcaaaaaatctgtaattttttcaagaaataaagtatactttgaatgtagttattactctgcaaaaaacttttactcctcttaaagttatatacaaataatttttataccaactttagttttagattattttctatactcagaactctgatttagtataacatctgaagtgtcagttccttatatatttctactataaattctctgatatttatgtagacttaaatttgaattaaattttttttttcatttttactgcattttcaaaaacatattgtagtataaactctggtgttttctaagctgtagtttttgaaaatttgttttcccaaatttattacatttgcaagacaactcttcaatataaattccctgatgttgaacaaagtttaagcaactcctttagagttttcctctagtacaaaatgtggacaataagatctgatacaagtaaagctactacaaccctctttacacgtgtaatgctcatcttcaatataaatcctcttcttcactttaaagaataagattttctgaaaggtcttttgacggtaattgcacttatcatgcttttagtaagtattaactctctggtgttagtaagatgtgagcagatattaatgtctttttcacagtctatatttgtacaatttttctcaaatatgaatgcttttctctgcaataaggtgtgagtattagttaaaaattttgccaccttgttctcacttgtaggaattttttccactatgaattatatcacctataatcaagtatgacaaccatttaaagactttgtcacattcttcacatttctaggatttctcagcaatatgatttctcttatggttagaaaagtttgaggtattgtcaaaagcattatcacatctttctgatttgtagagtttctctccagtatgaattatcttatgtgtgttaagaactgaggactagctaaagcctttgccatatttttcacactcatggggtttctctccaatatgaattttcttatgtttattaagaattgaggactggttaaaggctttgtcacattcttcacatttgtagggtttctctcctgaatgaattattttgttcaataaagttttaggactggttaaaagctttgccacattcttcacagttgtaagcagcttatgttatgtttagtaggagttgaggactggataaaggctttaccacattcttcacatttgtaagatttttctccagtatgagttatgcttagtaagttttgaggattggttaaaagctttgccacattcttcatatttgtagggtttctctccagcatgaattaacatatgtgtagtaagggttgatgattggttaaaatgtttgccacatttttcacatttgtagggcttctctccagtataagttatcttatgtgcagtaagttggggggacaggttaaaggctttgccacattcctcacatttgtaggttttctctccagtatgaattatcttatgtttagtaatggatgaagatttgttaaaagctttgcaagatttttcatatttgtataatttctctcccttatgaattattttatgtttagtaaggtatgagaatcagtaaaaagctttgagacattcttcatatttgtaggatttccagcatgaattatcttatatgtaggcaagattgaaaagtggttaaaagctttgtcacattttacacatttgtaggatttctgtatggtatgaattcttttatgtttagtaagggtcgaggaccaattaaagcctttgccacattcttcacatttgtagaatttctctccagtgtgaattttcttaagtttagtaagtatgagaatcaatagaaacctttgccacattcttcacatttgtagggtttctctccagcaggaattatcttatgtgtagtaaggtttaagtaccgtttaaaagcttttccacattctttagtaagggaagaggaccagtaaagccctttgccacattcttcacatttgtagaatttctcctcagtatgaattccaatatgaatgaccttatgtctactaaggtatgaggaccacttaaaagctttgccacatttggctgggtgcagtggctcaagcctgtaatctcaggaccttgggaggccaaggcgggcagatcacgagttcagaagattgagaccatcctggctaacatggtgaaaccctgtctttactaaaaatacaaaaaattagctgggcgtggtggtggcggcctgtagtcccagctactcaggaggctgaggcaggagaatggcgtgaacccgggagtggaggttacagtgagcctagatcatgccactgcactccaacctgggggacacagcaagactctgtgtcaaaaaaaaaaaaaaaaaaaaaggaaagaaagaaaaaaagatgaattatttcctttaactaaaaaataaacacaaaatttcagaaaagacacatttgaagaacatgtttaagagactctcagaatctctaactcagacaattgttcaaggtatgccaggggaaagccacattataaagattgggacaggtaagtttttttaatattcaaatttgaataaaagattatgatgtggccaggcgcagtggctcacacctgtagttccagcactttgagaggccgaggcgggcatatcacctgaggtcaggagttcaagaccagcttgaccaacatgaagaaaccccatctctactaaaaatacaaaattagccaggcatggtgacgggcatctgtaatcccagctactagggaggctgaggcaggagaatcgcttgactgggaggcgaggttgcggtgagctgagatcatgccattgcaccccagcttgggcaagaagaggaaaattccatctcaaaaaaaaaaaaaaattacaatgtatataaaatagggcaatgtggttccattaaaaataatataaaattttcagaaagaaacaataacaaatgtttacattagttttaaaaattgaaaataaattgaataatacccaatgagtgaaaaaagaacacagagaactataggatatcagaaaactggaaataagaataaaaatacttaaaatattagaaaaaagaaattatggaggtaaaaaatatataaagaataactgaaaaatctttaaaaaaagacataaaaatgaagaagctcaacaaacaaactaggatacacacaaagatatttatatcaaacacatacataagcacaattttaaaagtcacagaaaagggaatcttgggagctgcaagataaaagtgatgtgttggctgggcatggcagctctcacctgtaatcccagcactttgagagaccgaagcaggcagatcacctgaggtcaggagttcaagaccagcctgttcaacatggagaaacctgtctctactaaaaatacaaacttagccgggcgtagtggcacatgcctgtaatagcagctactcgggaggctgaggcaggagaatcgcttgaaccaaggcggcagaagttgcagtgagctgagatcacaaaattgcaatcagcctgggcaaacaagagcaaaactcagtctcaaaaaaaaaaaaaaatggtgatgtgttatttgcaagaatactcttatgggatatccaatggattctcaacaaaaattttgcaggccagaaggaaactgcatgatatatttaaggttcaaaaaaaatcaagtgagtataataccatcaccaaatctgtccttccaaataaaaagaaaaaaacctcaaaaataactaaattctaaaacagtatattggcactgccttacatataaaaggtgctgaaagcagtcgcttccaatgaaaataacatgattcaacaaaacaacacataatcatattaaaatacattattttctgggaaagatgtgtacatacacaaaaataaatttcttagcacaaagaatacatctatatagatacacaaaataagaaagaagaaaaagcatatcaaaatcaaaataaaaaagacacaaagagacagaaagagagaaaatgtgggacacaggtacaagaatcaaatagaaaaataaacaaatattagtctctttgtttaagaaaactttccaatcaagagttatactttcaataaagaaatttatttacaattattaaaaaccaagatccaatttgcctttctacaagggtcagctgacatctaatgataaaaaagatactgaaggtggcaagatggatttagacattggatgcaaatattaaccaaatgagagcagaagaggtcaaaatagtattacaaaagctacatcttaagtcaaaaactgttatattttatataaagtactttaagtcaaaacagcaaagaggcaaaggacattaaacaataatagatatatttactgggaacctattgcaaatttgtgtgcgtgtgtgtgtctgtatttcacaccaagttttcaaatatataaagcaaatattgacagacaggaagaaacacctaaacagcaatataattatagtaggaaatttcaataccctactttctgtaataaaaataaaacaagacagaatattagtaagtgaagagaggaattgaaggcagtataatacaattatttttaacagtggaatagacaagagccctcaacaatatcaggaaacacattcttatgaatagcttatacaacattctttttgatagaccacctgttaggccaaaaaaaggagtcttgaaaatttgttaaaattgacattttgtggattacattctataaccaaaatggaatgtaagtatagaacagaaaaaaaaattaaaaatgtacaaatatatagatatttaacaacacactcttcagcatgctcctgttcaaaagttgaaatattttgaagatgtccataatgctcaatgtaatctacagatttaatgcaatggtttcttttgttttgttctgttttgttttgttttgttttgttttgtttggagatggagtcttgctctgtcacccaggctggagtgcagtggtgcgatctcagctcaccgcaacctctgcctcccaggttcaagcgattctcctgcctcatcctcctgagtactgggactacaggtatataccaccatacctggctaatttttgtatttttagtagagatgaggtttcatcatacaggccaggctgggttcgaaatcctgtcctcatgatccacctgcctaagcctcccaaagtgctgggattacaggcgtgagcccccacaccatgcaataaaatgtttttaaaaatttctcattccatttttgaggaaatagaaatagcaatctcaaaagtatatagactatcaagagaaaatgaagtacccaacagtcttcaaaagaagaaacaatgttaaaggcattacaatttctgatttgaaaacacattacaaagctacagagttaaaacaatttgggggctgagcacagtggctcatgcctgtaatcccagaactttgggaggtcaaggcagcaggatcacaatgaggtcaggagttttaaaccagcctggccaacatggtgaaacccagtctctactaaatatgcaaaaattagctgagtgtggtggcaggcacctgtaatcccagctactcaggaggctgaggcagaagaatcacttgaacccaggaggtgaggttgcagtgagccatgatcatgccgtcatgccattgcaacccagcctgggtgacaagagtgaaactctgtctcaaaaaaaaaaaaaagaataaagaaaaagcaagaaaatagactttaaaaaaatctgtatgagtatagtcattaaaaagtgaactaataaaataggcagcacttatataaactttcatatacatgatcatatgaagagttatttgcatacccataattattgcagcattgttactgaaagccaacaggtagaagcaattcaaatttctgtaacaaaattattcagtagatgtaatttgaaatagaaaaataccatattatcatccagaattttataagcaggaaatactctaatactctttatagataaattttgacattatgcaaaatgaaatgagtcagccacaaaaagatagaaattgtaagaaatatatgaagcagttacactcttagaaaaagaaaacagaatggtgtttggaaaattcagaaaaccagaaaaattggttgttgtttaatgtgtattgagatttcgttttgaaagataaaaacattttagagatatgttgcataacattgtcaatataatatgactaaacagaatattaaaaaatatttgataataaattttgttatgtttttgacaagtaaaactaatacctaaaaatatagagttatgagagttttaatattatcttcaaatcccaaagtgttccttacacacaaaaataatatagattcacaatagacattgaaattaggagaatttttacgactgctcacctagacaagattgaacaaccatttacaacaaacctacataacaaatatacaagttattttaaaaacagcaataatatttatagagggaaacaaacatagaggtaatgatattggaagcagacatatggctgattcgtagttgattttgctcaacactgtcttaaattgtacagagttaaacattgtcatacagaattataatataaatcaaaacaacaaaacacaattaactggtttgaggtggcataccctgaaatacataacaaaaaatataatattgccaaagaaaattaaaatttagaatgtaaaaattattggacaccatcaagtagatcaatatattcatgaaaggaatcttaaagccatatataaaataaagcactctattaaatataaatataaagacacacatagaatgttttactgtcataatgatggtacataaaacctttgaagttcttctatagatataaaaaaaacataaatctgcacaaatctgttaatagatacaaaataagataacataatttgtaatacctataacaaactggaaaatatagcagtatagcttttgtatttaattaatgttattatgagattaaaagatactgttttaactttaaggtgttttatataatctccagttttcaagatggttacaatatacttcaagatgattacattatattataggaagtatgcaaaacaaaattttaaaaatcacaccatgtcacaacaaagttaaacaaaaattatgatagtaaaacaggtaatgagaaaaaacatgtctgcaagaaacacataaaacagtaacagtgaggtggttcctgtagatcagtagacttagtctttccctctgctggctctgaggaatctgggcagtacagatgtatggaatctccccctgtgcagcacaccccctacaccaaggagcaaccagagtgctttgttaagtggttcctggatcttgtgcatcctgacttggtgagaacccccccctcaaaaggtggtgtcaggcaacttataaaggagtgttcccattgtcatcaggttggtgcccttctgggaacaggccttaaagaaactggccataaactggatttctgcagcaatgtgacatgctcatgatggctataatgcacactgctagaagttgttggtttactggagcaggcaaggaacatctggcctgcccggagcagaaaactgctcaaaccacacacaatagcaggagcagcctgtgccttaacaacatgtttttgctacagataatcagccagagcctgtttctctactctttgctaagaatgctttgtttcccataaggaatgcttttagctaatctatagcctatagaaacaatgcttattactggcttgctgtcagtaaatatgtaggtcaaactcagtttgtggctctcagctctaaaggatgttgcccctctgactcccactctgcactctatttctgtgtctttgtcttaattcctctagcaccactggtttagggtatccatgactgagctggtctcagtagtgtccctctgggattaagatctcagagaaaggaggagacagtcatctctgctgttctgcagcctccactggtgacacctccaggtgtgagagaaacccagacaaatagagtctgaagcggattccaagcaaatgacagcagccccacagaagaagagcctgactgttaaaagtaaaacaaaaagacagaaagcaacaacaacaacagcaccaacaaaaaagtccccaaaaaccctatccaaaggtcagcagcctcaaagatcaaagctagataaactcatgaagatgagaagaatcaacaaacaaatgctgaaaactcaaaaagccagagcccctcttctccaaatgatcacaacatatctccaacaagggcactgaactgggtgaaggctgaaatggataaattggcagaagtagtcttcagaaaatgggtaataataaactttgctgagctaacaaagcatgttctaagccaatgcaaagaagctaagaatcataaaaaactaccttagagagaaacagaaatgacctgagggaactgaaaaacacaacatgagaacttcataatgcaaccaatagtatcaataactgagtagaccaagcagaggaaagaatttcagagcttgaagactagcttgctgaaataagacaggcagacaagattaaaaaagaataaaaaggaatgaacaaaatctctgataattataggattatgtaaaatgatcaaaactatgactgtttggggtaccttaaagagatcaagagaatggaaccaagttggaaaacatacttcagtgtatcatccagaagaacttttccaacctaacacgacaggccaacattcaaattcagaaaatccaaagaacctcagtaagatgtttcatgagaaaatcaaccccaacacacgtaatcatcaggttcttcaaggttgaaatgcaggaaaaaatgatatgaacagccagaaagaaaggccaggtcacctacaaagggaagctcatcagactaacagtggaattctaagcagaaatgttgcgggaagtcagggaccccgaacagagggactggctgaagccatggcagaaaaacataaattgtgaagatttcatggacatttatcacttccccaatcaatactcttgtgatttcctatgcctgtctttactttaatctcttaatctcatcatcttcataagctgaggatgtatgtggcctcaggaccctgtgatgattgtgttaactgcacaaattgttcataaagcatgtgtgtttaaacaatatgaaatctgggcaccttgaaaaaagaacaagataacagcaatgttcagggaacaagggagataaccctcaggtctgactgcctgagagccaggtggaacaaaccatatttctcttcttatgaaagtgaataggagaaatatcactgaattctttttctcagcaaggaacagccgtgagaaagagaatgcactcttagggggaggtctctgaaatggccgctctgggaatgtctgtcttacacagttgtagataagggatgaaataagccccggtctcccatagcactcccaggcctattaggatgaggaaattcccacctagtaaattttagtcagacagtttgtctgccctcaaaccctgtctcctgataagatgttatcaatgacaatgtgtgcctgaaacttcattagcaattttaattttgccccattgctctgcccctatttgccttgtgacattttattgccttgtgaagcatgtgatccctgtgacccacaccctattcatacactccctcccctttgaaaatcactaataaaaacttgctggttttgcagcttagggggcatcatggaacttgccgacatgtgatgtctcccacagacacccagcttcaaaatttctgtcttttgtacactttccctttatttctcagactggctgacacttagggaaatagaaaagaacttatgtgaaatattaggggtggttcccctgatacagaaaccttacaagctataaagattggaggccaatattcaacattcttaaagaaaataatttccaaccaagtatttcatattctgcaaaattacacgttataagttaaggagaaataaaatccttgtcagacaaacaaatgctgaagaaatttgtcaccaccagacctgccttgaaagaactcctgaaagaaggactaaatatagaaaagaaaaagaattaccagccactgcaaaaatacactgaagtacaaagactaatgacactgtgaaacatcaacaagtctgcaaaataaccagctagaatgatgaaaaggatcaaattcacacaaaactatattaaccttaaatgtaaatgagttaaatgcaccaagaaaagagacagaatggcaagctaaataaaaagtcaggactcattggtgtgctgtattcaagagacccatgtgtcacatgcaaagacacaaataggctcaaaataaaaaaaggaggaaaattcactaagcaaataaaagcagaaaaaaaagcagaggttgcaatcatagtttctgacaaaacagactttaaaccaacaaagaccaaaaaagataaagaagagcattacataatgctaaaataatcaattcaaggagcacccagattaaacaagcacattcttagagacctacaaaaagacttagattgccacacaacaatagtgggagactttaacacctcactgccaatattagacagataattgagaaagaaaagtaacatggatattcagaacttgaactcagctctgggtcaagtgaacctgatagatatctacagaactctccagtcaaaaacaacacaatacacattcttataagtgccatcttttagatggagtcttgccttgttgcccaggtgaaaatggctggaatgcaatggtgtgatctgagctcactgcaacctccacctccagggttcaaatgattctcctgcctcagtctcctgagcatctgggattacaggtgcatgtgaccacacccagctaatttcttttatctttagtagagatggggtttcaccatgttggccagactggtcttgaactcctgatcttgtgatccacccatcttggcctctcaaagtgctgggattacagtaagtgtgaggtgaagaagtcaggttctttgaataaaccagctctcatttgaattaatggagtgaaaactttctgattatcaaaaagatagtgtcaaggcatttatgaggtatttttccccttaacagacatgtacaaaactttctacttaaaagtcaaagaatacaaaatattcttatttgcacatgacgtattcagttaggaaatataacaagtcttattaaataataacagctgggggtagtggctaacatctataattccaacaatttggaagatgaaagtgagggagtcagttgggaccagaagtttgagaccagcctggataacatagtgagaccctgtccctacaaataataaaaaaattagccaggcatggttgtgaatgtctgtagtctcagctacttgggacgtttaggtaaaaacgtcatttgagtcaaggaggctgaggttgcagtgagccaaaattatgccactatactccagcctgagtgacaagtttgatcctttctcaaaatgacaacaacaaataaatttaaaaccaaaatcatacatgtgtgttttcttaacaaaactgaatgaaactagaaattaaaagcaaaagtaataatggcaaatccaagaatatataaaattgaaacacacaggctgagtacagtggctcccaacctctaatactggcattttgggaggctgaggcaggaggatttcttgagcccaggagtttgaaattagcctgggccacataggaaatccttatcaaaaaaaaaaaaaaaaagaaagaaagaaagaaaaagaaagaaaactaaaaaaacacactcttcatctcttcatcatattcttgctcaggggtcaaaaaatttaattgtgttaaaatgtcaatacaacctacagtggtgaacatattaagtatattctctataaaaatcacaatagcgctgggcatggtggctcacgtctgtaatctcagcattttgggaggccgaggtgggtggatcatgaggtcaggagttcgagaccagcctaaccaacatggtgaaaccccgtctctactaaaaatacaaaaattagccaggcggggtggcaggcacctgtaatcccagctacttgggagactgaggcaagagaatcacttgaaatgggaaggcagaggttgcaggttgcagtaagatgagatcatgccactgcactccagcctgggcaaaagagcaaaactccatcttaaaaaaaaaatcacaatggcacagttttattacagaaatattgcttaatattttaaaatttgattataaactataactagcaaaacacccatgaaaaagaacaaagagacattatactttctgattttaacacattaaaagttgcaataaaaaagtatgatacatacacaaaggaagataaaaagatgaaagaacagaatagagagcccagaaatgaagccttctgtatatgattacatgatctcttgcaaagttgccataagcacacaatagagaaaagatgatcagtcttctcaaaaaataatgttaaaaacttactatcgctttccatgctgacagcactcacacaaacatggcgaatgtccctaaaacccactggactttctgtaagaagtgtggcaagcaccaaccccacaaagtgacacagtacaagaagggcaaggattctctgtatgcccagggaaagcagcattatgacaggaagcagaatggctatgatgggcaaactaagccgattttccagaaaaaggctaaaactacaaagaagattgtgctaagtcttgagtgcattgagcccaaatgcagatcttagagaatgctggctattaaaagatgcaagcattttgaactgggagtagataagagaaagggccaagtgatccagttctaaagtgtcatcctttattatgaagacaataaaatcttgaatttatgttaaaaaaaaactgaatatcaacactgataaaataaagttacatcatttccttgaaccatatacaaaaaatttacaaaaaaaatacttaaatgtgttgcaggccaaaaaagtgagggtcatgatccatgatcaactcagtgtaccactggaggctatatgagtaaacagcaagctgttctcatgaatgcagaatgttggcaaaccgacaaactgcatgtgccacccagaggttatgctgagggcagtcacaccccaggcacaaatgtttcatgtgattaggcatacctgaagtctaatagcaataacgagaacctgtgatcaatcaagagctgaccaatcattacctcctcctccctgctctttctaccctgtgaatttggggatctgtggaagctcagggcagctgcccttgctcactagaagctgggagccctcttcttcttccccagaccctttccttaaagcatattgctttttccttggttttcatttcttcattcatcctccttcgttcagtcctgcagtaaccgtggcaaaccgtggcaagtggtgcccaacgtgggacttgatgaagggaactgcagggtcatacagggacttgcagggaactgaaggaacttacaggacctatagggacccatagggacagtcgagggacagataggaaaagataaagactagcagagacttgctgggacagaacagggacagaatagggacagagacagatagggtcctataggagcttgaacaaggaaggtctgcaggagcagaaaaagaagaaaaaaaagaaaagaaaaaaaattaaaaatgaaactgaccaggtgaaggagaaaccccttacgagtatgccggcagcgatataccctaaagaggtattggtcagtgccctaaaaggtacatagaatggaaagtttttgaatcagggtaacatgggggaagaatttggctatttcttttctcttttctgtttggagtttggtttgtactgttcttttgtcattgttccaaaatttaaaagaattttttgccctacccacagcacctatcgagggtggtgaacagaagagggaggatgaaaattggcttgtattgtttcttttgtggttgcagaaatgttaactttaactttggcttttgaaagtgcaaacgtttattgtggatgtgcactggcacctgtgagatgtgcagagagcttgggaaattttctcagagcctgtcaagatgtgagaactgagcttcatcgctctacaatgttggttcaagcaatggctaatttagtagttgataaatctaaaaagagccaagggtcaaactctaaacgggggaaatactataagtgtagaaagattggacatttcaaaaaagaatgccatcagatctctgggcagaagggatttgataatgcagtttccctctaacagaaaaaaatgccaggcctttgcccttgttgcaattaaggaaatcattgggctaatcaatgccactcaaaatttcatcaaaacaacacccccctgtcggggaatgagaaagggacctggacctgggcacctcaaacaatgagggcattccccgtccaggccacaactccatttcaggggtgggtttccggaggagcattgattccctctccccaggaacacctggaagcgcaggattacatctcccagccagagaatgggttacattaattgaaggagaaaaacccaataagatgcccactggtatttgggtacctttgccaataggatatatgggattaattttaggtagaagtcatcttaacttacatagcattgttgtagtccctggagttgttgattctgattgtgaaggataaattcaagtagtggtattgtcacaagatctttgggatttttaactagaatataatgctcaactgttgcttattccctgtaaattgatctttgggtttttgaactaggagatcaactgttgcttgttccatgtaaatcgcacccatcttcacaaaaggagaaaggagggaattaaggatttggaagtacaactacatgggaaatttatctatcacaacccatagcatgtaatagacccacctgtacagtgcaaattaaaggaaagagtttttatgggcttatggatatgggagctgatgtgtcagtaatatctaaaaataattgggccctatcttggcccttaaaactaacttctacatccctagtgagaataggagcagctcaaagtgttcaacagagttctatcctgtctcggaccagatggacagttatatacttttcaaccttatgttacgaatatagctgttaatctatggggtcgagatttacttacagcatgggatatgagacttacaaatgaaactattgataatccaggatttaaatgttaaagaaaatgggatatcagaatggaaaagccttaggaaaatccctacagggaaaccctgatctaatatcaataactggacacacagatagaaaagggttaggacatcaggacttctgatggggaggtcattgatatttctcctccacctactgctttgccgctagagtggctgactgacaaacctgtatgggtggatcagtggcccctatcacaggggaaactgattcaactccatcaattagtaaaagggcaattggaagcaggacatatagaagagtcggttggcccatggaattcaccagtatttgtgattcctaggaagtcaagaaaatggtgattgctgcatgatttgagagctattgatgcacagattaaaccaatgggtgcattacagcaaggtctgccatccacagcagccattccaagagactggccttaagtggtaatagatcttgaggatctattgtttttgctgtactgttgcacgagaaggatgggcctcaatttgttttctctgtgccttctgttaatcagaaagagcctgtctctcattatcaatggaaagtttaccccatggcaattagccaaagaggcagaagctgagttagaaccacaaaagcctttgcttttgttttggtagatttattaatgtggggacgagagtattcgtgcgtctgtaaaaagtaaagtagaggttcctcttcagagactttcctccccatttaggaataaataataatttctcttagaagcaaaatttattcaaagacctgtgctaacattcttaaatatctgctagccgtgataaagtaatcaatgtactttatgttcttagctctcacaatgtagcctaaatatttgccctgacatgcttacactagtccaagcaagcattaggtcatagcctgttcctcttccttatttgaaggtgtttttacctttctcagcattccacaagttacttcctccttcctttgttctcctctgcctttgactcttttaaaaaattctaagttgctaaacaattgggacacatacagaatgtgaggtcccattccggccaatggaaaccaaacacagcagtagggtggatgcatcaggttataaatgaccctgtctcctttgtttggtatactctcatggcaaaactgccggtgagtgtcccctttctgcaggaagtaaaaatggccttgctgaataaattaaatttatgttcaaatgctatttctttatggcaccagggaacaagcatttcaaacatatctttacaggaaatgaacaaaccgtgtgggtgccctcaggaacaaggttccaactggagtcatgctgacattaaccctcataacataggaacagttcaagaaaaccacacaagaagctgataaactgctggagtgccagggtcaggcaaaaactcctgactccatatttgtggccaagctggctgtaattttctgtacatctgtaagatcagctggaccaccagctggcagttgagggctgtacagtctgaattgccttttttcaactaaaaacaggacgagatgttacaggccaaaaaagtgagggagggttgtgatcaactcagagtaccactggacgctatatgagtaaacagcaagctgttctcatgaatgcagaatgttggcaaactgacaaactacatttgccacccagaggttatgctgagggcggtcacatcccaggcacaagtgtttcatgtgattaggcatacctgaagtctaatagcaacaatatgaacctgtgatcaatcaagcagctgaccaatcattacctcctcctccctgctctttctacccagtgaatttgggaggctgtggaaactcagggtggctgcccttgctcactagaagctgggagccctcttcttctccagaccctttccttaaaagatattgttttttctttggttctcatttctttgttcgtccttcgttcagtcccgcaataaccgtggcaatccgtgacagacatgcggccgggtgctgtggctcacgcctgtaatcccagcactttgggaggttgaggcgggtggatcacctgagatagagagtttgagactagcctgaccaacatggagaaaccccgtctctactaaaaatacaaaattagccaggtgtggtggcatatgcctgtaatcacagctactcaggagactgaggcaaaagaatcgcttgaacccaggaggcagaagttgtggtgacctgaaatcatgccatcgcactccagcctgggcaacaagagtgaaactccatctcaaaaacaaataaaaaacttaaacataaaaaaataacaaatcccttagaaaaaaatagaaaaaagagatgatataggtcttggcaccattttcttagaaatgacattaaatgcatgaacaacaaagaaaaaaatagaaaaatgtaagcacactatattcaaaatttctgcacactcaaaaaaatattcagtagagtgaaaaatgccctctagtaaacaagtgaaaatatttgcaaaacacatgtgataggagttaatattcagaatatataaacaactcttaaaattgaacaataaagctaaattgatttagaaatgagcaaataattgaacaaaattttcatcagaaaagatacacatatagaaaaaaacatttgaaatgacacagaaaattaatactttgtagagaaacacacaaaaataatgaaaaaattgcctcacacccattacaatggccactataaaattttaagcacaccaaatctgttgatgatgcaataaaaatgaaacctatgttgattgttagtagaaaacaaagataccgtcattatttttaaatgtcatgtttctcaaataattaaaaatggaattatcaaatatagcaatcccatttatgaatctatagtcaaaatatgccacacaagacaagaagacctatttgaacatcgatttattcacaaaagccaaaaggctgaagcaactaagatgtctcttgatttatgaacacatcgaaaatgtgacatatacatacagtgaaatattattcttaagaaagaaaatcttgtcacattttaagataagctttccaagtattatgtcacctatataagccagaaacaaaatgatggatgccgtatgattccacttacatgagatatcctaagtagtcacacttataaaaacagaaattggaagggtgtttgtcaagggctgggaaaagggtacatgcgttgttgttacttaatgggtactgggttttagtttcacaagatgtaaaactttcagaagtcttttgcacaacaatgtgaatatacttaacatgcttgaaatgtacagattggttttgagacaggttctcactctgtcacccaagctgaagtgaagtggcacaattaaggctcacttcagcctcaaatttcaaggctcaagtaatcctcccctctcagtctcccaagtagctggaaccacaggtgcacacgatcatacttggttattttttaaaaaaattttgtaagaaggaatcttcacatgttgcccaggctggtctgaaaattttgggttcaagtgatcttcctgtctttgcctcccaaatttctgaaattacagatgcgagccacccacatgtctggtcctgaaatgtacacttgaacagatttaagatgctaaattttatgttgtgtgtttttacaacaattaattttctaaaggaaaaactgaaaataatactgaattataactctttccaaaaattaccttcaaatcccagaagtgtttctcttacacaaaggaaatatatattcaacattaaacgcactgtgaaaataggaaatggtgaaaatatttccatgactactcacttagacaagataaaacgaccattgaaaatcagctaagaaacaatatacacaagataaaccataaccaatattggggtcatatttatagataaacaaacacacatatataatctgattgtgatagacatatggctgatttatctcttaattaaacctcacattgacttaaagtgcacaagcagaattgcaaattgactacaattgtaatacataaaaacaaccccaaaacacaataagctgatgttaagaaacgtacacgaaaaaaaccactaatataaaactgcacaataagagacaggtttactgataaaatttggtatgcaacattagtaaaccattaaaaaagaatttgtctaactacagtatttgactgtaactgtgactcatcaaaggtaggtattttgaatcattggcagtaaaatttcagggaatatgcagtataattataaataaaatatcctgatgagaaactttttttttttttgagatgcagtctcgcattgtcacccaggctggagtgtagtgttgcgatctcagctcactgtaagctccgcctcccgggttcacgccattctcctgcctcagcctcctgagtagctgggactacaggcacccgccaccacatccggctaactttttgtatttttactagagatggggtttcactgtgttagtcaagatggtctcgatcccctgacctcgtgatccgcctgcctcggcctcccaaagtgctgggattacaggtgtgagccaccacgccgggcctcaagaaacttttaataaataagcatttaaaagaaactagtgaccgggcacggtggctcatgcctgtaatcccagcactttgcaaggccaaggcaggtggatcacctgaggttagcagtttgaggccagccaggccaacatggtgaaaccccatttctactaaaaatacaaaaaaattagctggatgtggtggcgggcacctgtaatcccagatactcgagaggttgaggcagatgaattgcttgaacttgggaagcgaagatttcagtgagttgagatcacaccattgcactccagccagggcaacaagagtgaaactctgtctcaaaaaaaaaaaaaaaagaaagaaagaaagaagcaagtgttaacttttcttttctttttttttttttttgacatggagttttgctcttgttgctcaagctgaagtgcaatggaaatgatcttggctcaccacaaccaccgcctcctgggctcaagtgattctcctgcctcagcctcccgagtagctggaattacgggcatgtgccaccatacccagctaattttgtatttttagtagagatgggatttctccattttggtcaggatggtctcgaactcctgacctcaggtgatctgcccgcctcagcctcccaatgtgctgggattacaggcgtgagacaccatgcccagccacgataacttttatgttttaaatataagctattcatacacgaaataaaactgatgtaatccaactttagaagcaaagaatagccttacattgctaaattttaaaaaatatattttgcaaaatataattagagcctctgatatattaaacaaatatttagcaataaattatgttatcatttagatatatggacgaaaataggtgaaaatcttatttttttgcctacagcaaatttaaatttataagtaacgattttagtaaatatggagtgtctaccaattatctaaattactttagacaaaacatgtaaattctcacatattgtcctaaatgtctgaatctaaaattacagataaatttgaaatagaaaatagcaagtaaaaatgtataggaaaagaaacatcagtaagatgaaaaaatgaaaagtgctctatttgcttatccctcccacagcaagaacatttctcagccattctttacataaattcctttatgagagaaccaggcatcatggctcaaacctgtaatgaagatatatggtacactgaggttggagaattgcttcaggccaggatttcaagaccagcctgggttataaagtgagacctcacctcaaaaataagtgcctttgagacagctttgatatttagggaggcagttgtgaaattctgctaaagcccaagattgaggagcattccttttcagagagcaggtcctcattctggtgggaaattataggacctctggtcttggctacagaccaagaaatggcccaaccaacttggtcacactgagaattctgaagttactctgtaaccgtcccaaacttctcccagttacagtctggtagagaccctgcccttccagagacctggagaaagacagccatttgtagccatgtaggcaggcctacagaccttggtttttactgtggtccctgaagcagttcaatgactctgttccagctccatgggtagcagttcatggccagttctgcctacatagaaacctgcacagtgacctgaggaaatcctctctggtactcagtgaaagccatactcatttgcatcctgatataagggccactatatatggacccgactgcagaaagctgccctagagtctgctccacagataaaagtcctgaaggatatttaatctgttaaaaaacaaacaacaacaacaacaaaaaaaaaaaaacagcactttgggaggccgaggcaggtggatcacaaggtcaagagatcaagatcatcctggccaatatggtgaaaccccatctctactaaaaatacaaaaattagttgggcatggtggcacgcacctgtagtcgcagctacttgggaggctgagggaggagaattgcttgaacccgggaggcagaggttgcagtgagccgagcaactccagcctgcactccagcctggagacagagcaagactcccatctcaaaaaaaaaaaaaaaaagaaaaaagaaaacaaatgggaattacaactacccaagccccttgtaacaagccatctaaatgtggaccctagagcagacccagcagcctggtgaccaagttacaacccaactccactacaaacccagagggcatcccagaaccctggggacccaacaaaagcagatctttacctcctgaaatcagtatatgaaaatataagttgtttgctttttcaaattcatggacaccaatataaaaaacaattgtgcccattatcaatgcttctattttaacacagcactggaagtatgtggcagaataatgaataaaaaacatttttaaaagccattgaaatcaaagacaagtaaatagttgctgtttgaggaatatataatcttatacataaaaaaccatagacagtacattgaaatttgtctaataaatacactcagtaaattaacaaaatataaaattaacataaaagtataagttattgttctatacacttaaaacaagctattggatacagtagaaataaaaaatattttactaattttttttttttttttgagacagagtcttgctctgtggcccaggctggagtgtaataatgtgatctctgctcactgcaacctccacttcttgggttcaagtgattctgcttgttcagcctcctgagtagctgggattacaggtgcccactgccacacctgactaattttttatactttcagtcgagatggggtttcatcatgttggacagacaggtctcaaactcttgaactcaagtgatccatccgcctcagcctcccaaagtgctggaattacaggcctcagacatggtactggccaagaaaacaatctttttaaaaatataattaaaatactaaatttctgagaacaaatataacccaagaggtaaaaaatcttaacaatgaaagctataaatcaatgaaattagagaagacacaaataaattttaaaatatttcatatttatggaaagaataaatattgttaaagtatcatattctctaatctatagattcagcacaattcccatcaaaattccagtgaaatttttttttacagtaatgaaactataattttgaaatttacaagaaactacaataaactttgaatagccaaagcaatcttgaggaaaaagaacaaagcagagggacatcatactttataatttcaaactatatttcaagaatatagtaataaaaacaggagggaatgtgcagaaaattaacataaaaaccagcagaacagagaccactactctcacacattttagacatgatgcaaaaagataactaaaataatagtttaacacaaagttctcaaaatcatgcagatatttgtgtgtcccccaaaacaatggaaaagcagtcagattgtgcagtctcttatgtgccatgaagaggactttggctctcactgtgaacttgaaggaagatcaacgaagggaaagtagaatccttagagaatttaaaggcataagacagaagatgaccctatgtgagaaaaacaaaacgaaacacacacacctccggcttcccagaaactatttgctttggaacagagcttcccaaatcacactgtagagactggcttttgtttttttttaatcttccaacctttcatctatgtcaactgtttcatttagtctcacctacctggggtgtggctaccataccgtgtctcttcatattccagggatcttttccttgctcctgacagttgatcagatctggcctagagaaaccaatacctgctttattaaaaataaataacatgaatcttgctcttattctttaattaccaacctagtaccgtgcttagtaaagaggatgtaatagaatattccagaaaattaatcccaaactactacttaataacagaaagttcttaacatttagaaaatattttaaatttgtagctccttaatttcactacccagtactcatgaatcaaaaataagtgctggcaaatagattttaacatatgggcaacaatattttatactactaaatttttgaaattaccactactctggagtgaaggatacagaccagcttgggaaagtaaaacgttcaggccaagataaaacatcttgaagaaatttttttctacagagataatttctcaagattttttaaaaacaaagatcagaaattcctgtatgcaaagcataaattaccaaaaattattcaagaaaatagagaaatgaaacttttagggtatataaggaattgtgtattagagttattctcacccaagaagaccaggtttctgtagttctctaaaatcactttcctatacaaatcctgttgagcagtgtccaggcattgccactcctccagagagaatttgatggccacatccctaaatgtcaacggcccctgaaaaacacatgcgtgcgtgcacacacacacacacacacacacatatttacaagtgtcaatgggcaaaatttatcatttgaattatggttaaatgagagagtaaagaaaatttgttctgacttataggaatgactaaaattatccaacaattttccacacagaaatattctctaatgtattctctaactctgtgagaagagaatggtataagatccacaacaccagggcatagatgatacttttatgaataataaagtataaaactaaaggcataaacacaaacatgtacatttttagcactatatttgcatcataaagaatgagttgtgtatatttttcagacaaaaaagacatgctgagttagaaggcacctctcaagttttaatatgtataataaactgaagatcttgtgcagattttttttccagaagatctggaataaaatctgagtttctgaatttctaacaagctcactagtaatgccaatgcgtttggctgaaaaagaatattttatcaaacatctagtaagtgaaagaccctgtgttttacccaatttttctggcctggaaacaaagacaagagtcttcattcttcaaagacaggtatttgtaaagaaaactaagaaagaaaggcagctgccatattaaatgtgatggtttatgcacagctcttctttagctacacaaagatacttaataataaagagaaaaataattaactctatagtgaaataaatatttcagagagctctttaagtaaattgtaaaatcaactgcactaggatcaatttttatgatgtgctgatgcacacagaagaacacatcaccactgctgagatattgcccctcaaaaagtacagtctgaacttaaccatacagaaaaatcagttttatgcagagttcaagatgcagatatcttctatgtactgtaatttttaataacaatttaaagtagtctttctttagcaccctagagagtgggtatctctcaataattttttttcagaactttctgggtaataaatgctatcctgtttaaataagcattttcttagtcctgtactgcatagagttaatggagaaaacagatgaaacctcaacattacatgttctctatttttactaaggaccccagctttcccccaataggaatcttgaatatccatattttcccatttcaacagcaacaaagggaacatttttaatagtgccgattatgaattcctggtaagaattccacatggcatataagaagccatgatttagagagtgtagagaagactctgggatataggagagaaatattttgcagagacccttgactatcacaagaatttttttaagtagttaaaacaaattcattgggggaaaagaaacacaagtagagaagtgaaggtttgcaaggacttaaatgcatggcactccaggaggcagagtggacacagctcttcatctgacacatgtttagctgaaaaaaagccatttttcctcttttgtcttctttggaaatcctttccagatgacattctctggagaagttacacctgcatcttgagaaaattcctttaaagttgtcagcaccacctgtttacctgctagtctcacacccacagaaaaaagaactaagacctgtagaaaaagcccacccatttctgtcctttataacagcagagattcaggaacaatgagctgctccatgaatataaaaatatgtttctttatttttgtcttcaggtgctcgcccttgccacaaacaccagcaatttctgctacagtaatggaaatatgggtgacactgacctctccctatcaaacccaaacagaacagactctgtgaccaccttttagtgtaaaggagaaacttaactcttatgaatgtatcttgaaccccacacacttgattctgtcctcaccttagagtcacatgagacacaattaaaacaatgtgaatactttcacctagaacaataaacagaacctgtggagagagcctgtggagagtaaagagatgtctccaaattggccacataatcctcatgagaatcctgggctgataatcacttaactaagccttgcctctcaagccttaatgagctcaaaaatcacttggtaatgttggccccactctatgtaacgtgattctgcaggtttggaaagggtccatggatgggtgtttcaaaaaaatcccctgtcaatgctgatattgctccccctgggctcattattagcattagttagagaaaacaggcacagcacagtgtcccttacactcagcactcttgtcacaacacaaatatttctggtacaaataaagacaaaataacttcatcttaaagtatcatattctttgctggctccttaaagtttacagaggacacagaaggcaacaatgtctgaataagtctgcatttaaaaaacaacaggtacacatgaactaatgcaatgcttattaagtggcactatgttctcaagagtatgtaacagagcactgtgctgggaataacacactatgtgattaaatcctaataacaccttgagagttcatactaagttttcaataattctcaggatttagataaagggcccagaattattatttcttcctgtttctcaatcaccaattttaaccaataaactaaaagctaaatatagacagatgaagatatataaagaaataaagacataaaaagagtttaatgtagtttagagaatttttttgtttatatttacttgtttatgacttgcagagcaactactggatccgcaggaatagaaaacaagttgctaaatggaatgtttctgtaagcactggttttactacaaaatttagaaattaagatcttaaaatgtatactttacttttcttatgtatctgcttttggatttcaggatattgtgagcaaccgctctagaaagtcagcaggatttaacagccaaaacttgaatctttataaatcagttttgtaaggaaatactccagagttgggacagacctacaaggtctccaaaaagggtgaatctgatcagaactggggcagggagaggaacctatgtaaaatttgttctttatgccactggagtatttccagttctgtttttcctaagcttacctaagagaaacttaaatcccatagtttacgtaactttcatctatttttgccactgccctgtcaattttataacataaactaataaggaatttaaatgaatcttttaaagttttctaggataattttattaggagttaaatatgtattcttagaaaagtaaaacaaacccaaataacaacaacaactcttcagtccataaatatcccttcagataataacatcagaagtcacgccaatattaaaaaaaagtggctcaaatttttgtgtttttttttttttgcaaacatctattcaccgtactaataatataatgcttaattcaaccatgtattcagttgctagtctagactaaaagctcctagatggtagggaccatgactgcttcatccattttttgaatgaccatatgaaataaaagcaattagtttatttgtttgagtcacaagacctcctctttgtctttcacccaagtaccagaaaacttgagaaactctcgtctgggtaacaaccaaagttatctctcgtatgagggagaaaaaaacacaggatgattcctttctcttacaccaagacagaagcagaagaagagtgattacactcttgtcagcctgacacaattctgccctggacatcctcaaatgtctttaaaacacctaggtgattgtgagagggttcgcagtgacccagggctgatggcccagtgataagccaggctggagaaactcaggctgattctaaatagaaaatggaactgccatggtggagctccagaacctggatcacctatcctgatttgtgagcccttgggtatgaagaaggacaagaatactgtactccaatatcagaatttacaggtaagtatcattgtggtcatggctctggatactttgtggccttgatttctcactcttaagatgcttgtttatactcatggattctgtcatcagattctatttacacctggagcctctcacaaactgtagcaggtcactgaacaagattgaaaagcttaaagagccacactctcaaaggggagctttaagatgtctatgctgacatctaacaatgcagaaaatgccttctgttggttttcagtacattctcaatccaaagtacagccctgtcttgtaaatcccaggcagaggccagaccttatgtgcagattctaggtgggatcaacgggactctgcatccttgggtgttacagcaagcacagtacaatcaaaggggagattccttcatacaggctgctctagcacattctaagtaacacgtctacctaaaaggaaaaaactgaggcaacataaatataagtagagagttaatctaggccaagcttgaggattgtaaccttggagcaaagatacatcctccaaagactgaacaaataagaaattgaatccccgaatatagcaataacaagctccaaaactgaattagtatgaaataccctacccaccaaaaaaaaaaaacaaaaaaaaaaaacgaagaatgagacaaatttacagacgaattctaccagatgtcaaaagaagagctggtatcacttctactaatattatttcaaaatattgagaaaaagggactttttccccactcattatataaaaacagcattattctgataccaaaatctggcaaatataaaacaagaaatagaaaacttgaggccaatatttttaatgaacattgatgaaaatattctcaacaaaatactggaaaaccaaatccaggagaacatcaaaaagctaatccactatgatcaacttggctgtatctctgaaataaaaaattggttcaacatacaattaacaaatgttactcatcacataaacagaactaaagacaaaaaccacaaggttatttcagtagatgtttaaaaagctttcaataaaatttaccatcctttacgtttaaaaccctcaaaaaactaggcattcaaggtacatacatcaaaataatcagtcatctatgtatggcaaacttacagcaaacatactaaatggacacaagctggaagcattccttcatgaaaactggcacaagacaaggatgctttctctcaaaactcctattcaacatggaattgaaagtcttggccaaaacaatcagggaagagataaaagacattcaaacgggaaaaaagaaagtcaaactatattatccctatgtgcaggtgataagatgctatatcttcaaaaccctacagtctcagcagaaaagctctttaaattgataaacaacttcagcaaagtttcagggtactaagtcagtagcatccctgtacatcaacaatatcaagccaaaagccaaatcaaaaacataatcccattcacaactgccacaaaaagaatagaatatctaggaatgcagcaaaccagggaagtgaaagatctctgtgacaagaatgaaaatatactgcttagagaagtcagagatgacacaaacaaatggaaaaccattgtatgcttatgaatagaaaatattaatatcattaaaatggtcaaacagcccaagaaatttactgatttaatgctattcctatcaaactaccaaaaacattgttaacaaaatgataaaatattttaaaatttgtatggaaccaaaataagcctgatagccaagtcaattttaagcaaaaagaacaaagctggctggttgcggtggctcatgcctgtaatcccagcactttgggagtctgaggtggatggatcaggaggtcaggggttcaagaccagcctggccaacatagtgaaaccccatctctactaaaaatacaaaaatcagctgggcatggtgacgcatgcctgtagtcccaactacttgggaggctgaggcaggagaattgcttgaacctgggaggtggaggttacagtgagccaaaatcacaccactgtgctccagtttgggcaacagaatgagactctgtctaaaaaaaaaaaaaaaaaaaaaaaaaaaaaagaatgatgctggaagcattgcattgctcctcttcaaactacactacagtaaccaaagcgacattatactggtaaaaaacaacaacaacaacaacaaaaaacagactcatagaacaatgcaacagaatagagagcccagaaataatgccacacacctccagccatctgatatttgacaaagctgacaagaggaatgtaaaaagaatttcctatttaataaatggtgcagaaataactagctagcactgtatagaagattgaaactggtccccttgcttacatcatatataaaaatcaactcaagatgaataaaagacttaaatgcaaaacttaaaaaaaaaacctgcaagataaataacctagaaaataccattctaggcatagaaactagcaaagattacatgataaagataccaaaagcaattgcaacaacagcaaaaattgacaaattgaacctaattaaattaaaaagctttttcacagcaaaggaaaatatcaagagactaaccaatctacaaaattaaaaaaaatgcaaactattcttcttacagagatttaatatacagaattaagaaacttatgccaggcttggtgagtcacgcctataatcccaacactttcgaaggctgaggtgggtggatcatgaggtcagaagttcaagaccagcgtggtcaacgtagtgaaaccatgtctctactaaaaatacaaaaattagccaggtgtgggggcacacacctgtagtcacagctactcaggaagttgaggcaggagaatcacttgaacccaggagtcggaggttgcagtgaactgagaccacaccatttcatttcagcctgggtgacagggtgagaattcctctcaaaaaaaaaaaaaagagacttaaacaactttacaagaaaacaatatactacctcattaaaaagtaggcaaaaaaaaaagaagagatgcttttcaaaacaaatatgtgactaacaaaaatatttttaaaatgctcatcacagctgggcatggtggctcacacctgtaatcccagcactttgggaagccaaggggggtggatcacgaggtcaggagtccaagaccagcctggccaagatgggtgaaaccccatccttactaaaaatacacaaatacaaaaattagctgggtgcagtaccaggtgcctgtaatcccagcttctcaggaggctgaggcaggagaatcacttgaacccagggggcagagtttgcagtaaactgagatcatgccactgcactccaccctgggcgatggagtgagactccatctcaaaaaaaaaaaaaaatgctcatcacattagagaaatgcaaaaagaaagaaagaaaaaaaaagcctacaatgagataccatctcacaccagtcagaatggcactgttaaaaagtcaataacaggttgggtggggtggatcatgcctgtaatcccagcactttgggaggctgaggcaggtgaattacttgaggtcaggagttcaagaccagcctggccaacatggtgaaagtttatctctactaaaaatacaagaatcagtggggcatggtggtgtaaatctgtagtttcagctacttgggaggctaaggcatgagaatcacttgaacccgtgaggcggaggttacagtgagcaaagattttgtcactgcactccagtctgggtgacagagtgagactgcctcaaacacaaaagttaatagcagatcctggcaaggtttcagagaagagagaatgcttatacactgctggtgggagtataaattagttcaactattgtgaaaagcagagtggcaattcctaacagaactaaaaacagaattaccatcttccggcaacctcttaattgggtgatgtaattcatgtctaaattgaataactctctttttctcacttctgtagtatgcttccccctgcacagatctccccctactcacgaaatgcttttaaggaatcagacacccattggtctctgtgattctttaaaaatcccacaacattttctaggaacttgcctgggattgcagatgacagatttactgtctcctttgcctgtgggactagagccccagggccaggggagacctggcatccaaggtgcactgtgtgggagctccacccagatgtaaaccagctcttcccacatcccagcatcctgcccagcagcacaacagaactgaggatggggctgcaggatgataccagcacttcaggagctgtggtaaggagcaagggcccaaggcagggaagcccgtcccataaggatgaaggggagcttcatcacctcctggggaatgaccactaatccaacccagagtggttgggggcagcaggagtggcttgccaatttggatgaaacttgtgtccccactaacaaagtgaaagtggttcactggatctggagacaggaactggaaaaagggaggaaaggggccaatagaacagcaagtgcagcaaagtagagcttgctggcaaggtggcaagaatggcttgccaccacaactgggagtgtgtgggtgcatgtgaacccacccaggacatgagaggggttcgtttcatctgatgaggagtcctggggcaggggaggtgtgtgaaagagactgtctttggagaggccaacacggggagtgatgtggggaggcacagaacccttagcacgggctgtgtgctccaaggtaagagcaggggaaatcagacccaggatactgcatatggctgataggaccagttccacagctgcagcaggctgtgacaggggaaggcatgttcctggctaagcattgtccaaaactcctgtaataggacctgatctggtggatctgagagtgaaagtgagagcaaaagtgtgccccaagggaggaaatgggaggaaaagcatcaaaattgactcctttggaatgcatgataaataattttaaaaaaggatttagaggtgattataggattgaacttgatgctcaaaaattaaggacatactgtgagatagataggcctactttcaaagtggggtggccccctgaaggtacaatagacaggaaattaattggctatgtgtttaaggtggtcactggagttggaggacaaccaggatacccaggccagtttccctatgtagactcttggcttaatgtgccacaaactcaccccaagtggctacagccctgcctatgatattgcaaggcattagtggcttggggcagcccaaccaaaggaagcagaggaacctaaagtccctagcatctcccaggaaaaggaatccccaaagcctcagctgaaaccagttcttcaggccccacctgaggaaatgggatgtctgccccccatatgtgccagtctacctgtttttggcaagaatacacaggaggcagagttgggagcatctgaagagtcgggctcggaggaaagtgaggctcagtctccccaccaagtggaacagaagcccccattagaaaaaaacaaagaagatggaaagggtgatgcagctaggcacctctgctctggccaaccatgggctttgcagatgccactttgagagaccaggacacaagtttttgatgaccaggggcagatagaaggtggtcctaggcattatgttcatcagcctttctccactactgatctcttaaattggaaacagcacacaccctcctatacagaaaagcctcaggctctcattgatttggtgaattctattattatgacacataatccaacctggccagattgtcaacaatttttgctaactttatttcatacagaggagcataggagagttaatcaggcagctctcagctggttagaaaaggaagtcccagaggccacccctaacccatgccagttcgctgaggagcaatacccaaatgatgaccctaactgggacccaaatgaggcaagggacattgaacagctgcagctatataaaagggcactcctgaatgggataaaagcaggaggaaggaaagcaatgaatatgagtaaaatatcagaagtgcactgaaagcccaagtgcattcaatgaaaggctttgtgaggtatataggctgtacactccaattattccagaggctcctgaaaaccaaaatatgacaaatatgacctttgtcagtcaagcacagggagacataagacaaaagcttcagaggctggaaggctttgctggggaaaatattagtgaactcatggaaatagcaaacaaagtatacataaactgggaggaagaggcagagagaaaggaagaaagaacaaacagaagtaggaacaaggagacagcttaatttatagctgctgcactagcagaaagtaaccctggatttgctagaaggcatggccaaggcagaggctgaggaaggaagcaaacaagactgggagaagaaagctggacctggttggacaggaaccaatgtacaaggtgcaggcaaatgggccactggaaagatgagtgccctgaataggaaaaggatggaaatgatggtcaatggtctaacatctgagtgcagtatttggttgctagtcatggcacctcaaaggcagatcccgatctgatcggcttagcaggggccaagaattttgaggactgagacagactgggctccatctttttaggggagcctatggtctctatggaagtagggggtggttaatggattttttggtcaatactggtgctgatttctctgtggtaactcacccaattagccccccctaaaaataactgtgctactatcgtaggggcttccagggccaaagaaaagagacctttttgcaaatccaggagatgtgttattggagaacaggaggtgcagcacgactttctatatatgccaaattgcccagtgcccttgttaggaagggacttactccagaagctgcaggcacaaatttcctttacacctaataggaatatgacccagagatagggaagccaaaggcaatggtattgactctaattgccccaagggctgaggaatggtggctctaagaactgtgtacaggaggctgccagagccagacctacacaatatgcaggtaatacggggtaatatgtgggtaatatgtgggggctgaggacaaccgccctggacttgctctaaacagaccccaatggtagtagagcttaaccctcatgctgccccagtacaagtccatcaatacccactaccctgagaggcaattgatagaataacaaagcatctaaattggctttatatgcatgagattatagcaaaatgcaagtcctcatggaatactcctctgttacctgtgcgcaaaccaaatggggaatacaggccagtgcaggatctctgggcagtaaacaaagctgctgtcactattcatgccatagtgcccaacccatatacaatgctgggacagattcatgctgatgccacttggttcatgtgtctggacttaaaagatgccttcttttgtttgaggcttgctcctcaaagtcagcctgtatttgctatccagtgggggaaatcacaatatacctggacaaggctgccacaagggtttgagaattctaccatttttgaggaggccttggctacagatcttgaggcttttttgccacctagtgacaattgtgtgctattataatacattgatgacttgttattcactgcccccatgagggaggaatgcttccaaggaacagagaggcttcttcacctgctacgtgaagctggctgtaaagtgtccaaagacaaggcacaagtctgtttttgagaggttggatatctaggattcatggtatcccaaggccaatgcaggcttggaagtgcatgcaagaaggctgtatgtgcattatcaaccccagttacaaggcagcagggaatttctaggcatggcgggattctgctgaatctggattccaaacttctcccttatagcaaggcccttatatgaggctaccaaaggtgggtaaagagagcccctcctatgggaaaaggaaaaggaaaaggccttcaagggtataaaggaagctctcatccaggccccagcactaggattgccagatataaaaaagcccttctttttgtatgtggatgaatgaaagggaatggcagttggagtcttaactcagttgttgggctcttggcactggccggtaccatacttatccaaaagactggacttggtggccttagattggccctactgcctcagggcattggcagctaccacgacccttatagaagatgccaacaagctagccctaggtcagaagttaataattcaggtgccacacactgtagtcaccttaatggagcaaagagaacatcgttggctgtccaactctagaatgctgaagtatcaagggcttctgtgtgcaaatccctagacaacattaagactgtaaataccttgaacgcagctaccctgcagcctatggaagaacctgattggaaggatggtgagttacctcactgctagtaggaccttccccactgttgcataaatacagtgggcaaagtgttctcaagccaggaagatctcagagatacccccttggagagcccagatgttgaatacttcactgatggtagcagtttcataacacatggggtgtgatatggaggatatgcagtagtgacacaacacttggtggtcgaggctcaagccttaccttctgggacttctactaggaaggctgaattaataacattaactagagcacttttattggccaaggggaagaaagtaaatatatatacttctcaaaatatgcttttgcaactctgcacacccatggggtgacatacaaagagagaggactttagactatgagaaaaaaagaaataaaaaataaaaaggaaattctacaattattagaagccttatgggctccagagaaggtggctgccattcattgcagaggacaccaaactgggaaaagctataaggttcagggcaacagaaaggtggacccagaggctaggcaggcagcaatgaacaaggctttacctgtaaaaagaactctagcaatgcctctccttatagagccccctttgccagaggtacccaattactctttaagtgaaaaagcttggtttaggcaggaaacagggaagtatattaaaagtggatggtggctgttctctgatgggaggctagccatcccagagacaatagccccaaggtttgtgaagcagatccatcaaggaacacacattggaaggatggccctagagactgataggttgacacttctatgtgccacagctctctgcaaccacctgtgctgtttatgaacaatgtatgtctatcctgtgccctgaataatccaaaataagaacccactcaacccccaggaattcaggaaatgggagctgtgccttttgagaacctgcttgtagactttaccgagttgcctcaagcagaatgttactggtatatgctagtgtctgtttgcaccttctccaggtgggttgaggccttccctaacagaactgaaaaggcatgagaggtgacaaagctgctactaaaagacatatagcaaggtttggatagcctttaaccataggatcagacaatggtcctgcatttgtggcagaagtagtacaacagttgactcaacattttttttttgtatttattgatcattcttgggtgtttctcggagagggggatgtggcagggtcataggataatagtggagagaaggtcagcggataaacacatgaacaaaggtctctggttttcctaggcagaggtccctgcggccttccgcagtgtttgtgtccctgggtacttgagattagggagtggtgatgactcttaacgagcatgctgccttcaagcatctgtttaacaaagtacatcttgcaccacccttaatccatttaaccctgagttgacacaacacatgtttcagaaagcacagggttgggggtaaggtcatagattaacagcatcccaaggcagaagaatttttcttagtacagaacaaaatggagtctcctatgtctacttctttctacacagacacagtaataatctgatctctctttcttttccccacacttcccccttttcttttcaacaaaaccgccattgtcatcatggcccattctcgatggttgctgtctcttcggagctgttgggtacacctgcagaaaggctgttgcttcacacttggaagattgaacagcggccaggcagaggtgctcctcacttcccagatggggtggcggccgggcagaggcactcctcacatcccagatgatgggcggctgggcagaggcgctcctcacctcccagacggggtggccgggcagaggcgctcctcacttcccagacggggtggccaggcagaggtgctcctcacttcccagacggggcagctgggcagaggcgctccacacttcccagacggggtggccaggcagaggtgctcctcacttcccagacagggcagccgggcagaggtgctcctcactttgcagatgaggtggccaggcagaggcgctcctcacttcctagacagggtggcagccgggcagaggtgctcctcacatcccagacaatgggcggccgggcagaggtgctcctcacttcccagacggggcggccaggcagaggcactccccacttcccagacagggtggccgggcagaggcgctcctcacttcccagatggggtggctgctgggcagaggcgctcctcgcctctcagacggggcggccaggcagaggcactcctcagttcccagacagggcagccaggcagaggtactcctcacctcccagatggggtggtggccaggcagaggcgctcctcacatcccagatggggcggccaggcagaggcactcctcacttcccagacagggtggcagccgggcagaggcattcctctcatcccagacggggcagcaaccgggcagaggcactcctcacatcccagacggggctgccgggcagaggcgctcctcacttcgcagatgatgggcagccgggcagtggcgctcctcacttcccagatgatgggcggctgggcagaggtgctcctcacttcctagacggggcggccaagcagaggtgctcctcacctcccagatgaagggcggccggggagaggctctcctcacatcccagacgatgggcggccgggcagaggcgctcctcaccccccagacggggtggccgggcagaggcgctcctcactttccagacagggtggccagccagaggcgctcctcacatcccagacggggcagttgggcagaggcgctcctcacttcccagatgataggcggccgggcagaggtgctcctcacttcccagacgggacggccgggcagagatgctcctcacctcccagacagggtggccgggcagaggcgctcctcacttcctagatggggcagccaagcagaggcactcctcacctcccagatgaagggcagccggggagaggctctcctcacatcccagacgatgggcggctgggcagaggtgctactcacttcccagacagggcagctgctgggcagaggcgctcctcacctctcagacagggcggccgggcagaggcgctcctcagtacccagacagggcggccaggcagaggcactcctcacctcccagatggggtggcggccgggcagaggcgctcctcacatcccagatggggcggccgggcagaggcactccccacttcccagatggggtggcggccgggcagaggcacttctcacatcccagatggggcggctgggcagaggtgctcctcacttcccagatgatggacggctgggcagaggtgctcctcacctcccagacagggcggccaggcagaggcactcctcacttcccagacggcgtggccaggcagatgcactcctcacttcccagacggggtggcagccaggcagaggtgctcctcactttgtagacaggatggccgctgggcagagatgctcctcacctcccagacagggtggcggccgggcagaggcactcctcacctcccagacgggttggccgggcagaggggctcctcacatcccagacgatgggcggccaggcagagacgctcctcacttcctagacagggtggccgccgggcagaggctgtaatcttagcactttgggaggccaaggcaggtggctgggaggtggaggttgtagcgagccgagatcacgccactgcactccagcctgggcaatattgagcattgattgagcgagactccgtctgcaatcccagcacctcgggaggccgaggcgggcagatcactcgagctcaggagctggagaccagcccagccaacacggcgaaaccctatctccaccaaaaatacaaaaaccagtcaggtgtggtggcgcatgcctgcaatcccaggcactgggcaggccgaggcaggagaatcacgggagcccgaggcagggaggttgcagcgagccgagatcacggcagtacagtccagcctcagcaacagagggagaccatagaaagaaagaaagaaaggaaggaaggaaggaaggaaggaaggaaggaaggaaggaaggaaggaaggaaggaaggaaggagggaaggaagaagagagagagagaaaaaaagaaagaaagaaagaaagaaagaaagaaagaaagaaagaaagaaagaaagaaagaaagagaaagaaagagagagagagaaagaaagaaagaaagaaagaaagaaaggaaggaaggaaggaaggaaggaaggcaggcaggcaggcaggcaggcaggtgactcaacttttaaagatcaaatggaaactgcacacagcttactgaccacagagttcagagaaggtggaatggataaactggacactcaaacagctactaaaatagttttgccaggaaactcacttatgatgggatcaggtcttgcccgtggtcctcctccaggtcaggtgtatgcctagaaaacaaactggatattcgccctatgaaatattgttcagaaggccacccccaatcattaatccaattagaggggatttaaaggagttaggagagctaacccttagaagacagatttaggctttgggagtggcaatgcaggaggtgcaaggctgggtaaaggaaaggatacctataagtctaacagacccagtgcatccacataagctgggagactcagtctgggttaaaggtggaatccaacaaccctggggcccttataggatgggccctatattgtgatcatgtctggtcccactgctgttaaagttccaggtgtcacaccttggattcaccatagccggctacagccagtggcagcagtaactctcaatgacaatcagtggattagccaacaagacccagattgccccacccgaatggtcctatggtgaaacccaactaccagtaagaaggacaactgccctgctctgaccactctggaggctggtcagtctacacacggctgaagcttgaggatcctgcaagctctgctctagtcacatccaggaagctgactagtctacacatagccaaagctaagaggaccatctctggataagtaaatgtggatacaatttataagcctagttataatcctgtcaatactgattgttctgttgttatgttattactgcaaatgcttcaaatgtctatacccagaggaaggtttgccatgcccatgtgtagtgtaagcatgtttctattacatacactaatgttgttaccatttctgcatatactaaaagaggaactcttaggatatccagtttatgattaaaataaaagaattagaagaagcataatcacaaaaatagacacaaatatcaaaaaggatgtggtcataggagactggaaagataatgaatggcctactgaaagaatcattaaattctatgggatggctacctgggtgcaagacgggtcatgggggtaccatacccccatctgtatgctcaagcacatcataaggttgcaggaagtccttgaaatcataaccaataaaacatcaagggcactagatttattggcaatacaagcaacacaaatgaggaatgctatgtatcaaaatagattggctttagattacctcttagccttggaaggaggagtatgtggaaaatttaatttaaccaactgttgcctagaaatcaatgatagtggctgagctctcatggaaatcacagctacaatgtgcaagttggcccatgttccagttcagacttggttcagttggtccctggattccttgtttggaggaaggttctcagcctttcgaggattcaaaaccctcattagtgggttcttacttactcttggcatctgcctcatcctcccttgccttttacccctgtttattaggagcattcagtcaactacggaggcaatagtggcctgacacactatcatgcagttggtggtatttaccagatatcagctgctgccaatcgaagaagaagctcatctccacgaaaaggtggcaaatagtagtgcttcctattaacacctctgttataaaaagcaccaaaaaggggaatggaacaggaattgaaagaaattaaagtgtgtaagcagaaactcagttgtatgtaagaaaacctaactcctcctgagaaagagaaagagctggagtcctttaaaaactaactgcctgtttttctgtggctagtgagctttatctctcctgccttccaaggcattgtgaagactttgttttcctagctgtgcagctgctaggtcactagacagatacactcaagttgcaaaacatgtttttccttgaaaagtaagaaatgatgtaatgcatgtctcaattgaatgattgtctttgtttctcacttctgtagtacgcttccccctgcacagatctccccccactccacccccatgaaatgcttaaaaggtaacttaactctttgttcggggctcagtcctttggatgttaatccgactgggccagtgcacctaaataattataaatatcctcctgaatcccatcggtctctctgattccttaaaaatcccacaacatgggtatatacccaaagaaatataaattattccaccataaagatatatgcactctgggaagtgaggagtgcctctgcctggccgccgccccatctgggaagtgaggagcgcctctgcctggccgctgccccatctgggaagtgaggagcacctctgcctggctgcccactgtctgggatgtgaggagcccgtctgcctggctgccccatctgggaagtgaggagagcctcagcccagccgccaactgactggtatgtgaggagcacctctgcctggcttctgccctgtctgggaagtgaggagcaccttggcctggccaccaccctgactgggaagtgaggagcacctctgcccagctgcccactgtctgggaagtgaggagtgcctctgcccggctgctgccccatctgggaagtgaggagaacctctgcctggctgctgccttgtttaggaagtgaggagcacctcggcctggacgcctccctgactgggatggcaggagcatctctgcctggccgccactgtgactgggaagtgaggaacgcctctgcccagctgcccacagcctgggaagtgaggagcacctctgcccagcagcccaccatctgggaggtgaggagcgcctctgcccagctgcctacagcctgggaagtgaggagcacctctgcccagcagcccaccatctgggaggtgaggagcgcctctgcccagctgccgccccatctgggaagtgaagagctcctctgcctggctgctgccctgtctgggaagtgaggagcgcctctgcccggctgcccaccatccccccgatctgggaagtgaggagtgcctctgcccagctgcccaccatctgggaactgagaagtgcctctgcccagctgcagccccaacgtctggcaagtgaggagcacctctgcctggccgccgccctgtctgggaagtgaggacggcctctgcacagctgccacctcatctgggaagtgaggagcgcctctacccacccccgccctgtctgggaagggaggactgtctgggaaatgaggactgcctctgcccagctgcctccccatctgggatgtgaggagcacctctgcctggcgactgtgcaaccttccgagtgtgaagtgacaaccttctgtgtgatcttttctgtcttccccaagtttgcatttttgacattaaagtttactttttaattaaaagttttaaattgggaaacattaaaaaaaagacgtgcacatgcatgttcatttcacccctgtccacaataacaaagacatggaataaacctaattgcctgttaatagtagactagattgaaaaaatatgatgtggtagcacgaggtggctcacatttgtaattccagcactttaggagatcaaggcaggtggactgccttagctcaagagttcaagaccagcctgggccgagtgtggtggctcacgcctgtaatcccagcactttgggaggccaagacgggtggatcacgaggtcaggggatcgagaccatcctggccaacatggtaaaacctcatctctactaataatacaaaaattagctgagcatggtgcacatacctgttaccccacctactcgggaggctgaggcaggagaattgattgaagcagagagtcagaggttgcagtgagccaagatcgtgccactgcactgcagcctggtgacagagcaagactctgtctcaaaaaataaaataaaataaaataaaataaaataccagcctgggcaacatggcaaaactgtatctctacaaataatacaaaaaagaaaaattaggcatgatgttgtgtgcctatagtcccagttacttaacgggctgaggtaggattccttgagccttgagacttggatgttaaggctgaagtgagccaagattgcaccactgcactccagcctgtgtgacagagtgagacgctcttccaaaaataaaataaagatttagtaaaaacaaaatatggtacacaaaaatcgtggaagactacgtgaccatataaaaacaacacaaagccaggcaccatggctcatgcctctaatcccagcactttgggaggctgaggtgggtggataacttgagatcagaagttcaaggccaggctggtcaacacgctaaaaccctgtctctactaaaaatacaaaaagttagctgggcatcacggcaggcacctgtaatcccacctactcaggagactgaggcaggagaatcgcttgaacttgggaggtggaggttgcagtgagccaagatcatgccaatgcactccagcctgagtgacagagtaagaattcatcttaaaaaaacaagcaaacaaacaaaacacaccaagattaagtccttcgcagcaacatagatggagctagagaccattattgttagaaaactgatgcaaaaacagaaaaccaaatgcatgtgattatttataagtaagagctaaataataacacagggacacaaggaaggaacagtcactgaggcctggttggggatgaaggataaaaggacaaagaggatcagaaaaaaatacctctttggtgctatgtttagtacctcagtgacaaaataatctacaccaaacccccatgacacaattttacccatataacaaacctgcacgtgtatgcctgaaccaaaaagaaaagttaagaaaagaaaaacccacgagtgcagaagagcgcagtgtaactggaaagaattgtttgttctacagatagtggtcctggtggggctgtactctgatttatttctgtgtccatgcaggcagatgagattatgaacaggtgctccataatgctaggtagatggagaaaacaggatgctgtggcagattcagtgtctggggtggggatatgccaggagacttgtagacacttttgtggctttttggcaagaaacactaggatcaaaaatgctgtggtgaagttcctgatggtggtgcctagtcccaggaggactgtgaacacattaatgtccagtaggtttgtttgtgagtgggtgggaatgctggggtgacagctgtgagacaagggggtctgtcattagaggtcctttcctctgagttttcattttctctcaccctgggaggagacctggaatcacagaacaacaggtagtgtgacagcctgtgtacaggagagcagagcctcccatttccagacacccagagttccatttgaggtcaggcctctgtgatatctttcttctggcaccaaatctgtagagtttgctgaacaagcaattctctaacaccaactcaatgtctaacatttgaattctgacaccacccagagtcagcacagactctgattcagggctcagttccacaacattgtcctcattgcagatgccagtcacaaaccccataggcccatctatgtgtctgagatactgtttaaaaattggggactcccgagccctttctcaagttcaattatctgatcaacctactcacagaactcagaaaaacactgtagttatgtttaccagtttattataaaacatacaactgaagaaaagtccaatggaagacatgtataggacaaaaaaagaggtggaaagctgaaacacatacataaccctggtaaatagggtaaatagctgtgattaataaaattcttcatcctttgtgttctccaggaatagtttatagaaagaaacactcttcctattatgacttaagatggtgctcttttttcttatttattacagagccagacacagactctgccagaggtacacagcctccattttgaataggggctgagtaaaataaggctgagacctaccgggctgcatttccagatggttaggcattctaagccacaagatgagataggaggtcagcacaagatacaggtcaaaaagctggcttgcagtaaagaagcgggataaaagccaccaaaaccaagatggtgatgagagtgacctctggtcatcctcactgctacactcccaccagtcccatgatagtttacaaatgccatgaaaacatcaggaagttacaccataaagatctaaaaaggagaggcataatccaccttttatttaacatataattaaaaattaaccataaaaatgtgcaaccagcctaaggagaaagccatttcttttatttctttacttccttaataaatttgctttcaccttactctacgactcgccctgaattctctcttgagcaagatccaagaagaaactggaaatttagtatcttattgcaagctagattgaggctggagaaatgggggatgggtcccaagaccctgcctgggacacaggtgaaaaaggcagcagaaaatcagttccccgtggagtgtgaaaataattaagtggcaggaaattagagtgaggtgtttctagtccctgggttcctacttcaaaaaaacaaacacaaaaatctaactcaggtgcattatttttaattaccacattcaaagaaacaaaattcaggcttcagcaactatcaactgccaattaagttctgattacttaatcaggactttttcacctttaatgtacaaattaagacactatgtaaaaaaaaaacacatcacgtggctgggtgcggtggctcacgcctgtaatcccagcactttgggaggctgaggcgggtggatcatgaggtcaagagatcatgacgatcctggccaacatggtgaaaccccatttctactaaaaagtgcaaaaattagctgggcgtggtggcttgcacctgtagtcccagctacttggggggctgaggccggagaatctcttgatcctgggaggcggcggttgcagtgagctgaaatcgcaccactgcatgctagcctgggcgacggagcaagactccatcaaaaaaaaaaaaaaaaaaaaaaaaaaaaagaacacaaaacaaaaaaggctgggcacagtgtaactgtaccatgtaactgtacctaaccaattattaaacttggttttcttcatcatgcattttataaaagactttccttcaagtctctcccatagaccacaaactacaaaccatagctgggtgctctacaattctagaaccactctttgattaagttatttaatatttttgcagtaactcccataaatttttaataggagaaaataggaactgggacccccacgcacgaaagttcttcctatttatgaaccgcatcccaagtcaggattctcccctgatgaccctcccgtggtccctgcacaatctgagagagatgcagggccgcgggtgcagagctgcccagagagggcaccaggccagggcacagtcactgcacagggaaaagacaggacacccagggcgctggctgtcggcacagccaccatattatggctgaaggggactgaggctgagatgggccaggagaacttgggtgcagattgtggagctgactgctgggaggcctaagtcctaccacgaccacttcccactggttccaaccagccccttccgctctctcaggatgtcggacccagcactctcaccatttctaggcttccagggcgtcccgttttagctgtggatctcccaatacctgcaggtcacagggctacagaggctaggcctctaggagcagaagacacagagcagtgaaaatgagacctggagctccagctgcagcaagagacaaaggactccccacatcccagaagccatcctctccactccagctgcgcctgattggacagttcccagcccagcgttgctgattggataatgtttaaaaccccaccctctcaggccttgactgacagaagatgtgattagatgctgggttgaatgaagaaagagtgacagcctaggctgcagccttttcaggcagggcttactgtcagagatgagctaggcccaccttacagggtatttgcattcaaccttgtgtataaggtcatatgcttttgtaaataatgtgtcataaatcctctgaaataaaattttgaattttctagtagccaaactttaaaaagaaacaaggggctgggcatggtggctcctgcctgtaatcccaacgttagggtgaagcaggcaaatcatgaggtcaagagattgagaccatcctggccaacatggtgaaaccccgtctctactaaaaagaatacaaaaattagctgggtgtggtggtgcacccctgtagtcccagatacttgggaggctgaggcaggagaatcacttgaacttgggtggcagaggttgcagtgagccaagctcgcaccactgcatgccagcctaggcaacaagagcaaaacctcatctcaaaaaaaaaaaacaaaaaagacaattgaataaaatttttgtataaatatttacatagcccatcaggtatcagaaatgtacataaagttttgattgtcttctcaggattatatatttgaccaaaaaaaaaaggtcctaacccattttagtaatctataatagtaaccaaacacacagacacaaacacccacacacacacttcatttattaacttagattattttttctctcttctgtgatgagtaattaaatgcagtgtttttgataaaagaagtttttttttttttcctttctgatcttggttatttctttacttctgctgggtttgggtttggtttgtttttgtttctcaagttccttgagatgtgaccttagattgtctatttgtgctctttcagattttttgatgtaggcatttaaggctatgtactttccacttagcttcacctttgccatatcccagatgttttgataggttgtgtcactattattgttcagttcaaataatttttaaatttccatcttgattttattgttgacccaatgatcactcaggagcatgttattcaattttcatgtatttacattgttttgaaggttccttttggagttgattttcgattttatccccctgtagtttgagagactacttgatataattttgattttcttaaatttattaagagttgttttgtgtcctatcatatggtctatcttagagaaagtttcacatgctgatttgggaacttcagtgttaggtgcttatatatttagaactgtaatatttttctgtttgacagggtttttatcattatataatatcccactttgtcttttcttaactgctgttgttttaaagtgtgtttgtctgatatatgaatatctacttctgctcatttttggtatccatttgcatggattttttttttcacatttttaccttaaccctagtgtgttagatgagtttcttgaaggcagaagatacttggttggtgaattcttatctattctgcaattctatatctttcaagtggaacatttaggccatttacattcaatgttactattgagatgtgaggtactgttttatttatcatgctatttgttgcttgaatactttgtttttataaaacattttgttgtattcatattttataggccctgtgagatttatgctttaaagaggtcctgttttgatatttttccaggacttcttagagttccttttagcagtttttgtagtgctggcttggtagcggtgaattctctcagcatttgtttgtatggaaagacattttttccttcaattatgaagcttagttttcctggatacaaagttcttcactgatagttggtttgcttaaggaggctgaaaatagggtcccaatcccttcttgcttgtagggtttttgctgttaatctgataggtttttattttgtatatttttaggttacctggtgcttttgcctcacagctcttaacattctttcctttgccttgactttagataacctgataacaatttgtctaggcagtggtcattttgtaatgaatgtcccaggtgtttttgagcttcttgtatttgaatgtctaggtctctagccaagaaagaaaagtttacctcaattactttcccaaatatgctttctgaacttttagatttctcttcttcctgaggaatgcaaattatttttaggtttggtaatttaacataattccaaacttcttggaggctttgctgatttttttattctttctgtttgcctttgttcgattgggttaattcaaaaatcttgttttggagctcggaatttctttcttctagttgttcaactctattactgagactcttcagtacattttgcatttctctaagtgtgtttttatttcctgaagttgttattgttttttatttattctatttttttcactgaagatttctcccctcatatcttgtattattcattgatttccataaattggactttacatttctatggtacctacttgattagtttaataattgactttctaaatttttttttagacactacatggatttcttcttggtttggattcattgctggtaaacttgcatgatttttgggtggtgctaaagaacattgttttttcatattaccagaattgtttttctggttctttctcatttgggtagactgtgtgagaggggagatctgggggcttaaggctgctgtatagattcttttgtcccacagggtgctccctcgatgtaataccctaaccctttttctagggatgtagcttcctaagagctgaactatagtgattgttatttctcttctggacgcaggtctattagtctctgggctggtacttgagggtgtctgcacagagtcctgtgatgtgaatcatcttcaggtctctcagccatggacaccagcacctgctgtggtggaagttgcagaggagtgaaattgactctgttgcatccttaattgtaattgtttaatgaactagttttttgctggttggcctcctgccaagaggtggcaccttcaagagagcatcagctgtggtagtatagggaggatcagctactggacaggaccctagaactttcaagagaatatgaattttgtctttgtctaccagagtgggtagggaaggaccatcaggtgggggcagggttaggcaagtctgagctgagactctcctttggaggtgcttgcagtggctgctgtggtgggatgaggtgtggttcccaggtcaatggagttatgttcccaggaggattatggctgcctctgctggtgatgcacgttgtcaggaaagtgggaaaaagcagacagtcacaggcctcacccaactcccacacaacccaaaaggccagtctagctcccatgatgcctctccccccgacagcaccaggttagttttcagggagtgggtgagcagggctgagaacttgccccaggctaccagcctcctggcaaagagagcaagcaggacttttacacctttccacctgtcaagtctgcacattggattcacgccctcctctgagttctggcaagaaaacttcacgtttggttggaattgttacaaagttaagctggaggtaaaaccattttatatttttaataaaatatttttttcaaactttctgctaacttacagatctaaatatatttagcttttctatatcatataaaaataagattctagtcaggcatggtggctcacacttgtaatcccagcattttgggaggccaagaaacaaagactgtttaaacccagaaatttgataccaacatggcaaaatcccatgtctacccaatatacaaaaattaacatttgggcacggtggctcaagtgtgtaatcccagcactttgagaggctaagacaggcagatcacaaagtcaggagattgagaccatcttagctaacatggtgaaaccccgtttctactaaaaatacaaaaagtttgctgggcgtggtggtgggcacctgtagtcacagctactcaggaggctgaggcagaagaatcgcttgaacccaggaggcagagcttgcagtgagtcgagatcatgccactgcactccagcctgggcgacagggactccgtctcaaaaaaaaaaaaaaaagaaagaaaagaaaacaaaaattagctgggcatggtggccagtgcctgcattacctgctattcaggaagctgaggtaggaggatggcctgagcccaggagcttgaggctgcagtaagccatgatcaatctactgctctccatcctgggtgaaagagtgaaatcctttctaaaaaaatgccaaagcatagcaacgtaaacttctgtgggtttttttaaattgttgttattattattctaagagcttttgaggtaaaggtgttgtttggctacataggtaagttcttcagcagtaatgcctgagatttaggtgcacccagcaactaagaagtgtatactgtacccaatgtgtagtcttttagctctcaccctcctcctgctcttcccctcaagtcctcagagttcattatataattctcatgctttggaatccccatagcttagctcccacttgtaaatgagaacatacgatattgattttttattcctgagttacttcacttagaacaatgatcttctaatccattcaagttgctgtgaatgccattactccattttttaatggctgagtattacatggtatatacatatcacattttcttcatccacttgatggttgatgggcatttagggtgcttccatatttctgcaattggaaattgttttgctataaacatgactgtgcaagtgtcttttttatataatgacttttttcttcatgtaaatgcccagtagtgggattgctggatcagatggtagttctacttttagttctttaaaaaaatctcctggctgggtgtgctggctcaagcctatattcccaacactttgggaggccaaggtgggtaaatcacctgaaatcaggaatttgagaccagcctggccaacatggtgaaaacctatctctactaaaagtacaaacaaattagccagtcatggtggcatgtgcctgtagtccaagctactgaggaggctgaggcaggagaatcacttgaacttggaaggcagaggctgcagtgagctgacatcacgccactgcactcagcctgggtgacagagtgagactccatctcaaaaaataataataataataaaaattcccagctgttttccatagtgattgtactagtttacatttccaccagtagtgttaaaatgctccattttcatcaaatccatggcaatatctagttttttgatgttttaattgtggccattcttgcaggagtaaggtggtatcacattgtaattttaatctgcattttcctgacaattagtgatgttgagcattttttttcagtattcacattttttatttcaaggtgtaaaatatatgtgtccagtattgttactttcatctgcagatggaataattgggaagtataaaaacctgtacttgacttttttttgtttttgtttttgagacagagtctcgctctgtcatccaggatggagtgcagtggcacgatctcggttcactgtaaaccccgcctcccgggttcaagtgattcttctgcctcagcctcttgagtagctgggaatacaggcatgtgccaccatgcctggctaatttttgtatttttagtagagatggggtgtcaacatactggccacgctggtcttgaactcctgacctcatgatccacctgcctcagcctcccaaaatgctgggattacaggcatgagccactgtgcccagccttgtacttgatattttatcaagattatctgccaacaagttacccatattcgggtttcaatgagcctggaatcttctttccacttgataggggtatgtattaggaaatccagttgatgacatttttatttaaaaaatcaaaaagaatcagcacagtcaggttgtcttagtcttaaggatttctggattcctttcttggaggaggtcaggatctttccaaggcttgggtccttggatattcttccagtcatcaaaagtggagtcttttctcatattctgactctaatgatactatttgctttcagtttttttccaactcaggatcaattttaatcttcactgcatcatgtcagatttgtaaaaactcacgaacaccaaaagaaactccaacaattagcaacaacatggggacttcgtagtggagagtcttattcttgcgcaaagcacgcatcactgcgggtgcaaacgactgaactcttccacccgtttagaactgcaagcaggcccaacgcagattctcaaatctcagtggtccaagctctcatcaagatgagactcaccaactttccttggttgtttggtgttcggtccttactgataggtttccaagcattttttaaatatgtttgttggccatttgtatatcttcttttgagaattgtctattcgtgtcattcgtccacattttcatgggattatttgtttgtttgtttgtttgttttttcttgctgatttgttcaagttccttgtagattccgggtaacagtcctttgttgaatgcattggttgtaaatattttctactctgtgggttttctctttactctgctgattacttcttttgctgtgcagaagcttttcagtttagtaagtcccatttatttatgatttttttttttttgcatttgctttagggttcctggttacaaactctttgcctaagcaaatgtctagaagcgttcttctgatgttatcttctagaatttttatagtttcaggtcttagatttcagtctttgatccatgttgagttgatttttgtataggatgagagatgaagacccaattttcttattctacatgtggcttaccagctatctcagcaccatttctttaacaggctgtcctttttttttttttaaaacggagttttgctcttgttgcccaggctggagtacaatggcacaatcttggctcactgtaacctctgcctcctgggttcaagtgatgctcctgcttcagcctcctgagtagctgggaatacaggcgcgtgccaccatgcctggctaattttttgtattattagtagaaactgggttttgccatgttggtcaggctggtcttgaactcctaacctcaagtgatccacctgtcttggtctcccaaagggctgggattacaggcataagccactgtgcctggctaatttttgtagttttattaaagatgaggtttcaccatgttggccaggctggtctcaaactcctgacctcaggtgatccacctgccttggcctcccgaagtgctgggattacaggcatgagccaccacgcccagccttagggtgtcctttttatactttgttttcgttaacagtgtcaaaaattagttggctttaagtatttgggttcatttctgggtatgaaattctgttgttgttctacatgcctatttttataccagtaccatactgttttgataactatcaccttttgatatagtttgaagttggtaatgtaatgccttcagatttgttcttattacttagtcttgttttggctatgtgggctttttttggttcaatatgaattttataattgtctttttttgttttagttctgtgaagaatgatgatgctatctttatgggaattgcatggaatttgtagattgtttttggcatcatggtcatgttcacaatagtcactctacttatccatgagcatgaaatgtgtttccatttgtttgtgtcatctataatttatttcaagtgttttgttatttaccttgtagagatcgtttgcctccttggctaagtatattcctaattattattattattattattattattattattattattattatttttcagctgttgtaagaggggttgagttcttgatttgattcctagtttgggttgctatttgtgcatagcagtgctactgaattttgtacattgattttgtatcctgaaacttcactgaattcatttatcagatctaggggctttttggatgagtctttagtgtcttttaggtatacaatcacatcatcagtgaacagtcacagtttgacttcctcttttccaatttggatgccctttatttctttctcttgtttgaatgctctggctaagaattccagtactatgtcgaatagaagtggtgaaagtgaacatccttgtcttgttctagctctcaggggtaatgctttcaaatttttcccattcagtataaggtgggctgtgggtttgtcataaatggcttttgttaccttaagctatgtcctctctctgccagttttgctaagggttttaatgctgaagtgatgctggattttgtcagatttttttctgagcctattgagataatcatgtgatttttgtttttaattctgtttatgtggtatatcacatttatttacttgcatatgttaaaccatcccttcatttctggtataaaatgcacttgatcatggtgtattatctttttgatatgctgttgtatttggttagctaggaatttgctgataattttatcatctatgttcatcagaaatatttactttttttgtttttttgtcatgcctttttctggtttggggattagggtgatattggcttgatggaatgatttagagaagattacctttttatcttttggaatagtttcagtaagattggtaacaattcttctttgaatgtctgatgataaaatatatctgtgaattcatgtactcctggacttatttggttagcaattttttattactatttcaatctcactacctcttattggtctgttcagagtttctgtttcttccaggtttaatctaaaaggattgtgtatttccaggaatttatgcatcttctctaggttttctaatttgtacatgtaaatatattcatggtagcaaaatcttttgtatttctgtggtattgtctgtaaatcttccattttgtttgtaattgagcttatttagatcttctctctgctttttttggttaatcttgctagtaatggtctatcaattttgttcaactttgtaaacaaccagctttttgtttcatttattttcttgtatttttttgtttcaatttcagttagtttttctctttgttattttttctgtgctgctgcatttggatttgatttgtttttgcttctctagatttttgaggtgtaaccttatgtagtctgtttttgccattttagactttttgatgtaggcatttattgctatcaactttctcttagcacgacttttgctgtatcccagaggtattcataagttgtgacattattgtcattcaaatcaaagtgtttttaaatttccaccttaattttgttgttgattcaaagctcattcaggaggctgggcatggtgactcactcctataattccagcactttggtgggcagatcacttgaggtcaggagtttgagactatccttgccaaaatagtgaaaccccatctctactaaaaatacaaaaattagccaggcatggtggcttgttcctgtaatcctacctactcggaggctgaattgcttgaacctaagaggtggatgttgcagtgagccaagatcatgccactgcactccagcctgggcaatagagtgagactctgtttcaaaaaaaaaaaaaaaaaatcattcaggagtaggctatttgggtttatttctgggttctgtattctgttctactgatctatgtgcctggtttttttgtttgtttgtttgtttgtttgtttttttgagatggagtctcgctctgtctcccaggctggagtgcagtggcgcgatctcggctcactgcaagctccacctcccgggttcgcgccattgtcctgcctcagcctcctgagtagctgggactacaggcgcctgccaccgcgcccggctaattttttgtatttttagtagagacggggtttcaccgttttagccaggatggtctcaatctcatgacctcgtgatccatctgcctcggcctcccaaagtgctgggattacaggcgtgagccaccgcgcctggcctatgtgcctgtttttataccagtatcctgctgttttggggactagggccttataaaatatattatgccttgaagtcaggtaacacgatgcctccagatttgttctttttgcttagttttgctttggctatgtgagctcttttttggttccatatggattttatcagtgatttttctacttctgtgaagaacattggtggtattttgatggaaattgcattgaatttttagattgctactgatttgtgtacgttgattttgtatcctgaaactttgctgaattcatttatcagttatagaagcttttcagaggagtctttaatgttttctaggtatactattatattaccatcaaacagcaacagcttgatttccaccttaccaatttaaaactttttttttttttttttgagacggagtctccctctgtcaccaggatggagtgcagtggcacgatcttggctcactgcaacatctgcctccggggtcaagcgattctcctgcctcagcctcctaagtaactgggactacaagtgtgtgccaccacagccggctaatttttgtgtttttagtagagacagggtttcactatcttagccaggctggtctcgaactcctgggctcataatccacccgcctcggcttcccaaactgctgggattataggcatgagccaccgtgcccggcctaacaattatatctgtctcatcacttaaaagagccactaattttttttttttgagatggagtcttgctctgttgcccaggctggagtgcaatggcatgatctcagctcactgcaacctccgcctcctgggttcaagccattctcccatctcagcctcttgagtagctgggattacaggcacgcaccaccatgcctggctaatttttgtatttttagtagagatggggtttcaccatgttggccaggctggtcctgaactcctgacctcgtgattcgcccgccttggcctcccaaagtgttgggattacaggtgtgagccactgcacccagaaagagccgctaattttactttggaaatatagtgaatatttatattaaaagctaggctaagcttactattatgtagaaaatttgtgatttgcatgtgcattattacccattaagtggtctacagtttctgaaagtttcagaaacaccaatataaaaatactatttctgattgaataaaggatatcaagttattttagttactaaatgaaacagattggaattactggtcacaatgtggttttaaatgttatttaatgaaaacgtgaagtttctgttcaactcatgttaactatttctattgtttttttcacttctattagaaaaatattaaaatttaaattgctacaaatgtatgaatgtattcaaatctaaacacagtgccaatcttaaaagatctgtatgcataggattatagaacacctattctctttttacacttagaagataaataactgcttttcagtaaacccaatggggcaattgtgactcacaatcataagctactaaaatattaatactatcatctagaaagtattaattcatttttcttacttatgaaacacaatcataatttctagttgacataacactagatttgaggtgctgtggctgtagtaactagaaatgtcatggttgactcagctttaccttctgcctatttctcacaaacacagcaaaacaaggaaggccagaaatcctacaccttgattgcaaacacaccagtacccttctagggagaatatatgtttgaacatattaacttgaaattcctggcatcttttcttgaagaacagactttttttttttttttttttttgaggtggagtttttctcttgttgcccaggctggagggtaatgtcgctgtgtcggctgaccgcaacctctgcctcctaggtacaagcgattctcctgcctcagccttctgagtggctgggattacaagcacctgccaccatgtctggctaattttctttgtatttttagtagagacagggtttcatcatgttggccaggctggtctcgaattcctgacctcaggtgatccgcctgccttgaccttccaaagtgctgaaattacaggcatgagccacgatgcccagcctgaggaacagatttctatatggcaaataataaaggcaaataaaaattaacgctaaaatagaatgaggaaagtattctttcttcaccagaatggttgtgacagaatggttgcagcagggtggtcttaaataaccctcactctattttgttattcttgagttatggtcataagacatttatgcttatttgagagaaatctttttttcctaattcagaaatttagcatgattttcacaatctcacattttcaaaaatggttcattataaaaaagaaagatgattaaaccaacttccattttttccccaaagagtaacaaattaaatctgtagtctaaagtacagctaataaaaaataaagattagtcacttattctagctgcataattgggaataaaacacttcttgagctatagaccaagagctttcagagatgttagcttatagaatgtcgagcgacctggtacagagactttcacccctctttcaaaagggaacataatactgagtctttcaccccaattccaactattaagccagaacgggagaagtgtaacatgtcattatccacaaaccattttattattacagattgagggtatgtgtgcagatttgtaacacaggtatactgcatggtgttgaggtttgggcacttaataatcccattacctaagtggcatacatcatacctgttaagtagtttttcactgtttctctcccttctttcttctttttggaatccccagtgtttattgttttcatctttgtttccatatgcacccaatgtttagctcccacatgtaagtaagaacatgtaatagttttctgttaatttgcttagaataatggccatcttctgcagacatgttgctacaaaggacattacttcactgtcttctgtggctgcatagtattgcatgatgtacaagtatctaagttttttttatccaatttaagattcatggctacctagtttaattctgtctttgctactgtgaatagtgctgcaataaacacgtgagtgcaaggagtcttttgggtaaaataatttattctcaggcggggcacagtggctcacgcctgtaatcccagcactttgggaagcccaagtgggtggatcatgaggtcaagagttggagaccagcctggccaccaggatgaaaccccgtctctactaaaaatacaaaaaattagccgggcatggtgacacatgcctgtagtcccagctactcaagaggctgagggaggagaattgctggaacccagcaggcagagactgaagtgagtccagatcgcgccactgcactctagctggggagacagagcaagactccatctcaaaaataaacaaataaataaataaataatttattctccttttggtatacacccagtaatgagactgatgggtcaaacggcaattctattttcagttaagaaatctccaaactgcatttcacaagggctgcattaaactgcatttcaaccaacagtatatatacattcccttttctccacaacttcaacatctgcaatatttttactttttaataacagccattctaactgctatgaaatggcatcacattgtcattttgatttacatgtctctgatgattagggatggtgagcaattttttgcatgtttattggcaactctcatgtctttttttgagaagtgtctactcagatcatttgtgtatttccttattaaatttttatagtattctaaccattaacttaatttatatattatataaatacataatatatatgaataaatattaactttttcttgtatgaagtttgaaaatagtttattccatactctaggttgtctgcatatttgtcaatggtttcttttggtgtgcagaagttttttagtttaattaggtgttaatttttcacttttatttttgttgcattcacttttatggtgttagtcataaatcctttccagaggccagtgactagaagagtacttttttgatgttctacgatttttatagctttaagtttcacagttaagtttttaatctattttgaattacattttttatatggtgagaggtacagtttcaattttctccttctacatatgattaaccagttttcccagtaccatttgttggatagacaatttttccttgtttacttctgttgactttgtcagaaaaaagttgggtgtagaaatgtaaacttatttcagggctttctcttctttctattggtctacatgtgtatttttgtagcaagccatgtaatatggattactgtagctttgtagtacaagccaggtaatgtgaggcctccaggattgctttgttgttaatgttgctttggctaaatgggctgttttattcttccatatgacttttagaatggttttctttttctaattccataaaaagttgcatttatagtttgagagaagtagcacttaatctgtaagttgctttaggcagcacggacattttaattatattgattctttaaattcatgagcatggagtgcctttttacttatttgcgttgtctctattttttttcagcagttttgtagttcttgttgtagagatattttacctccttgatttaatgtattactaggtacatatttttttgtttgtagctattgtaaatagaaccatgttctttttttctcagcttgaatattattggtgcacagaaatgctactcatttgtgtatgttgatttagtatggtgagactttgctgaagtcattctttaggcttagaaatcttttggtgaaatctttttcggtgaagtttcccaggtagagaattatatcaccagtgaagataatttgacttcctctttttctatttgaatacattttattgctttatcttgttaaattgctgtggctacgactttcaggactatgttgaatagaagtgtttagagtggatactctttgtctttttttttttttttttttgagatggagtctcactcttgttgcccaggctggattgcaatggcatgatctcagttcactgcaacctctgcctcccacattcaagtgattctcctgcctcagcctcctgagtagctgggattacacatgcctgccagcacgacaggctaattttttgtatttttagtacagacagagtttcaccctgttggccaggctggtcttgaactcctgacctcaggtgatccacccacctcagcctcccaaagagccgggattacaggcgtgagcaactgcacccagccttatttttattctgatggagacctcatccaggttttgcccgctcagtatgatgttggctgaggatttgtcatggatggctcttattattttcaggcatatttctccagtgcttagtttgttgagaatgtttttataaatgagtattagattttcttgaatgccttttctgcatgtgataattgttttttaaaaattatctttacatggtgaatcacatttatttacttgtatatgatgaaacatctttgcattcatacaatgaagtttacatgattgtggcaaaataactttttgctttgcttatgaactcaacttgctagtacttcatgaatttttgtttcaattttcaccaagaatagtgaccggtaattttccttttttgttgtgtcttcactaggttttactaccaagataataatgttttcaaataatttaggaaggacttccaccttgatttttggaatacactcagtagaattaataccaggttatctttgtatatgtgataaaatgtggctgtgaactcatcttatccagggctttctatggttggtagcttgttttattagtaattcaatcttattatatactttatacattgttgctctgttcaagacttctgtttctttctggttcaatgctgagaagctggatgtatccaggagtttatctattttctctaaattttttagtttgcatgcatagagatgtgcatagtagtctctgaggatgtttactatttatgtgaaattagttgtgatatcacaactctaacatttaaatagatgcagaataaaagcttgacaaaatttggctgggtgcagtggctcacacctgtaatcccagcactttgggaggtcgaggcgggtgggtcacctgaggtcaggagttcgagaccagcctggccaacgtggggaaaccctgtctctactaaaaatacaaaaattaactgggcgtggtggctcacgcttgtaatcccagctactcaggaggctgaggcaggagaattgcttgaacctgggaggcagaggttgcagtgagccgagatcgtgccagtgcactccagcctggatgacaagagtgaaactccagccaaaaaaaaaaacaaaagtttgacaaaattcaacattccctcatgataatctctaaaaaataattagtataggacaaatgcatctcaagccaataaatgccatgtatagaaaaaaatgtccagctaacaacatattaaacagtgaaatgtaagctcttactctaagacctagaacaagacagggatgccctctttcttccttttcctttcttcctttccttctctccttttcttgcttctctttctttctctctcctttcttcctttccttctctccttttctttcttctttctttctctctctccttccttccttttctttctttcttgttctttcttcttttttttttttgacggagtctcactcttgtcacccagactggagtgcaatggcacaatcacagctcactgcaacctctgtctcccaggttcaagcgattcacctccctctgcctcccaagtaactgggattacatgcacctgccaccatatccagttaatttttgtatttttagttagactgggtttcaccatgttggccaagctggtctcgaactcctgacctcaggtgatccacctgccttggcttcccaaagtgctgggattacaggcatgagccaccactcctgagcagatgaccactttcttcattcttaactaaacataatactaaatgtccaaagagagaaattgtaagataaaagcaaagataggcagattggaagaaaagaaattaaattatttgtttgcagacgatataatcttaagtacagaaaagcctaagactttactagaactactagaactaataaacaaatttattaaatttgcagaatacaaatcaacatatgaaagtcagtagcatttctatacactaacaattaactatctcaaaatgaaatttaaaaagaatcccagctacaataacttgagtaactatactttgaaataaatttaagtaaaaaggtgaaacaccttatattataatctaaagaacataaaagtaaaaaattaagtaatacacaaatggaaaatattactcattcctgaattggtactattaatattgctaaatatgtgtgttaaacaaaataatctacagataaaatgtaacctgtatcaaaataccagtgacttcataaaatttttaaaatgtatttaaaattaatatggcaccacaaaagaccccaaatacccagagcaatcaagcaaaaaagaaaggttgaaggtatcacacaaccttactttgaaatatactacaaagctatagtgaccaaagcagtatattggaataaaaatgaacccaaagaaaccagaaatatatccatgtatttacaactgtctaattttaaatataggtgacaatttctcagagaaaggacagtatcttcaataaatggtgttgagaaactttacagccacatgcaaagcaatgagaccctcatttgacaccacatgtaaaaatcaattcaaaataaattagaaacttacatgtaatgcttgaaactgcaatgaaactaatacacaaaagtagagtaaaagccccataacattggtctaggcagtaactttttttttttttttttgagatagagtctcgttcttttgcacaggctggagtgcattggtgcaacctcagctcactgcaacctccatctcccgggttcaagcaattctcctgcctcagcctcccaagtagctgggactacaggtgtgtgccatcaagtctggctaatttttgtatttttagtagagacggggtttcaccatgctggccaggctgttctcaaactggcctcaagtgatccacctgcctcggcctcccaaaatgctgggattgcaggcatgaatcaccacacccggctggcagtgactttatgatttaaactcaaaccccaggaaagcaaaggaaaaatagatgactcagattacttcaaattaaaaagctgctgcacagaatctgatgaaatcaacaggatgtgacaactaagaaataagagaaaatatgtgcaaatcatacatgtgacaaagggttaatatcaaaaatatattaaaattcaaatgactatatcacaaaaaacaaattaaaaatgagtaaaatgcttatttttcaaaagacatacatagagccaacagatacataaaaaattctcaatgtcaattattattattgaaagccaagacaaaataactgtgagatatatactcacttttgatagaatgactcttagtaaaaagaaatgtgttgataaagatgtgaagaaaagggaatgcttgtatactattggtatgagtgtaaatgaggacagccattttggaaaacaaaagagagatttttcaaaaaaaatttaaaatcaaactaccatataatacagcaattgcactattaaatatacatccaaaatgaataaaatcacaatgaaggaaagtttgcacttctatgttgtttgcaacactcaacacctaataagtaaataaagacaatgtggtagatatatctagtggaatactcttcacctctaaaaaaaaattctattattttcaaccacatggattaacctagaggatattagttgaaataagccaggcacagaaagattagtatttcacgatttcacctacacttaaagtataaataacaaatctcattgaagtagagagtaaaatggtgaccacaagatgccaagatacttagaaaaaagaatggtttggaaagatgtctatcaatgaatacataattatagttaagttggaggaataagttcaagatattgtttgtgcaacactgactacagttcataatattgtatttttgaaaaatggtaagaggatattacaggctctcaccacaaaaatgtaaactatgtgaggtaaagcattaattacctagaatttatcatttgacaatgtagatatacttcaaatcatcatgctttacagaacacacatttcatctgtccagttaagaaatgtatttttaaaacattatagaaggataacaatgtttcaaatattgtgtcttcatcattaattttgctgaatagtatccaaaatatatggtttttgtgctgtttttttcgcattatttttcagccacaacacaaccataggtactctgatatttaacagcatgttctggacacagcacagtgtatgagaggagccaatgtagtttagggcttctaagcttggggcacctggagtttctggtgctgatggtaatggtatgatagacagtaaatgggcaggtgatgtttattgtcccatgactgtgaacacagtaaacaagcttgcatgcaaaataataggaaatgttttaatccacaagttgccaaaatttccaaaattcttcagagaaaatgaccaaggagttggctatacttagatgactcagaataaaaactgtagattgggccaggtgcgggggctcacgcctgttatcagcattttgggaagctgaggcaggtggatcatgaggtcagcagttcgagaccagcctgcccaatatggggaaaccctggtctctactaaaaatacaaaaattagctgggtgtggtggcgcatgcctgtaatcctagctacctggaaggctgaggcaggagaatcacttgaacctgggaggcggaggttgcagtgagccgaggttgggccactgcactccagcctgggcaacagagcaaaactctttctcaaaaacaaaaaaaaactgtagactgaacttcacccactgaaaaaaagttatatgaactggaaatttcttcaaattgtaatatcagtatggaaaagaaatattatctcaaatttcaaattcacagaggtcactttattattttgccatgtttaacattcactcttaaagtagaagattctgcatagaaattaagttacactacattacagaaaagtaaatttaaaattctttacttaccattagaactcctaaaattttgatttctaaaatatattctctagcaaattttgtatttgctacacgttgtataaaaatctaggccaggcgcagtggctcacgcctgtaatcccagcactttggaaggccgagatgggcggatcatgaggtcaggagatcgagcccctcctggctaacacggtgaaaccccgtctctactaaaaatacaaaaaattagctgggcgtgttggcgggcgcctgtagtcccagctactcaggacactgaggaaggagaatggcgtgaatgtgggaggcggagcttgcagtgagccgagatcgtgccactgcactccagcctgggggacacagcgagacactgtctcaaaaaaaaaaaaaaaaattaaacagatttcaacaagaaaaaataataaaaatttaacctacggaaacagtattttttaaacttatttgcagttgaaagccactggcaaaggagattaccagagatgttagttgattacattaccaaatagtatattcttactatcatttacctacacctttgagtaaatgggataggtttcagttagtggcataataatgcttcattgaatgcacaatagtattaacatgttaaaaatgtataatgaaacaagttcacacatcatctgaaaatttaaaaatgtactgcattttattacataaaagtacaaatagtaaaataacgtactaattttttaattttaacaaaacttaaatgttcttactataatgcaaaagaatattactctaaacacctacctcatgcaccactcaatatcataattaaccacaaataccatctccacttagattttcatcatgcatgttacattttaatgtccttactcttccaaagaaaaggtcataaataatgcccacctaaaaaaaaagaaactctcctatctttgatgccgtgacaactgatcacatgctttcacatgtgaatacaatagaaatgaagaaatagcatcaagtaactagagagttgaatcacagcaatattagctttttaaaaaatctgtacttcttttcaaggaaaaaagaacactttgggccgggcgctgtggcttaagcctgtaatcacagcactttgggaagccaagctgggcagagcatgaggtcaggagttcaagactaccctgaccaatatggtgaaaccccgtccctactaaaaatacaaaagtcagccggacgtggtggtgtgcacctgtaatctcagctactcagtaggctgaggcaggagaattgcttgaacccaggaggcagaggttgcagcgagctgagattgtgccactgcactccagcctggacgacagagagagactctgtctcaaggaaaacaaacaaacaaaaaaagtatactttgaatgtaattacaaacttccaaaaaatcttctactccttttaaagttatgtacaaataaatttatctaccgttagtttgggatcatttttaacagtcagcactttgatatagtgtaatgtctgaagcatccataccttagtttgtttgtttttgagatggagtctcactctgtcacccggctggagtgcagtggtgcaatctcggctcactacaacctctgcctcctgggttcaacggattttcctgcctcagcgtcccaagtagctgagactacaggcacgtgccgccacgcccagctaatttttgtatttttagtagagacagggttttaccatgttgaccaggatggtctcaatctgttgacctcatgatctgcccacctcagcctcccaaagtgctggcattacaggcgtgagccaccatgcccggccctaccttagatatttccactgtgaattctctgatatttacatagacttattttggattaaatgttttaaatatatactgcatctgcaaaaatatatctcagtatgaaccctctggtgttgtctaagttgtagttttggaaaacttttttttcaaatttattacatttgcagggtttttctccaatctgaattccctgatgttgaacaaagtttaagtaactgcttcagggttttctctagtacaaaatgtgtacaataagatctgtgatacaaataaaggtattacaatcctcttttatttgtaatgtttgtcttcaaaataaatactttaaaagcttatattttctgaaatactttttgacagtaattaaatttataatactttttttaagtactctctgatgttgagtaagatgtgagcagacattaatggctttttcacagtctttatattggtacaatttttctcaagtataaatgctttcctggcaataaggtgtgagtattcattaaaaattttgccacattcttcacacttgtaagagtttttctagtaagaattatcttacctacaatcaagtgtgacaatcatttaaagattttgtcacatttttcgcatttttaaagttcctcaccagtatgatttattttatgtttagaaaagtttgaggtgttgtcagaattactgtgatgtcttccagctttgtagtttctctccagtttaagtttttttatgtttagtaagatttagggaccagttaaatgctttgccacattctttacatttgtagggtttctctctagtatgaattatcttttgtttcataaggattaagagccagttaaaggctttgccacatttatcacatttgtaggatttctctccagtatgaattatcttgtgttttaataaaagttgaaaatacactaaaggatttgacacattatttacatttgtagggtttctctttggtatgaattctcttatgtttagtaaggtttggggactggttaaaggctttgccacattcttcacatttgtagggtttctctccagtatgaattatcttatgtttcataagggttgaggactggttaaaagctttgccacattctttacatttgtagggtttctctccagtatgaattatcttatgtgtagtaagatgagaggacagaataaagcttttgccacattcttcacacttatagggtttctctccagtatgaatttttttatgattagtaaaatttgaggagtagttaaaagttttgccacattcttcacatttgtagggtttgtcttcagtatgaattactttatgtttagtaaggattgagaatatactaaaggctttaccacattcttcacatttgtagggtttctttccagtatgaattaccttatgataagtaagagttgaggacttggtaaaggctttaccacattcttcacatttgtagggtttctctccagtatgaattaccttatgattagtaaggtgtgaggaccggttaaaagctttgccacattcttcacatttgtagggtttctcttcagtatgaattatcttatgtttagtaagggttgaaaatacactaaaagctttgccacattcttcacatttgtagggtttctcaccagtatgaatcctcttatgtgtagtaaggtgtgaagatagggtaaaggctttgccacattctccacatttgtagggtttctctccagtatgaattttcttgtgattagtaaggtttgaggactgtttaaaagctttgccacattcttcacatttgtagggtttctctccagtatgaactatcttatgtttagtaaggtttgaggaccggttaaaagctttgccacattcttcacatttgtagagtttctctccagtatgaattatcttatgtctagtaagagttgaggactggttaaaagcttttccacattcttcacatttgtagggtttctctccagtatgaattatcttatgattcgtaaggtttgaggactttttaaaagctttgccacattcttcacatttgtagggtttttctccagtatgaattatctcatgttgagttagttgtgaaagcatgcaaaatgatttgccacattctttacatttgaaaggattttttccagtatgtcttatcttatgtctctttgcatttgaatatttatgaaagactttcacgtatttgtcacactgaactattttgctctgggtagttgtcacacaccggttaagtcccttgtgacctcctttgtgcaacttatgctcatccacacttttacagcctttctgatatccacattttccatatcttctcagtatcacttgttggaaagaattttttatatattgctctggcctaaggtctttggcaaaatgagaacacatagctgaaagaaataaaaataacaaattattccatttactcaactcagattaatatttacaaatctaacttataccaactatataaacaagatgacatagcaaaatactacagatcctaaatcctttatagacatataaatgtaacaaaagcattctgaccaaaatacatttgtaaaaaatttataaataagtaaagtctgtgcagtgccccaggtgatgacaatgcaaagagccacataggagaaaaaagaaaagtctgttacatttacccaacacacctctttctgctgcccaatataacatagcgccttcagaagtaaattgccaactcctggtttcttttttaaaagactaaaaaaaatagtgtcacatacatctttatttctggctcttaggggccttttcagacactggtttctgtctcccatgacataaagtgctaaaagaaatggtggtatactttggaatgacagtttgagtctgctgagaccaaagttaagtgttacagcagcagagactgcagtaccacatacaggaaacaggtttagcaagtgattactgactatttagaaaaaacactaacatacttctttaacttaaaaagcccacaaaatttcagacaagacacaatctaagaaaatgtttgcgagactcccaaaatctctagccaagacaactggtttcaaactatcccaggcctaaggtacattataaagattgtgacagggccgggcacagtagctcacagctgtaatcccagcattttgggaggccaaggcgggtgaatcacctgaggttgggagttcaagaccagcctgaccaacatggagaaaccccatctctactaaaaatacaaaattagctgggcatggtggcacatgcctgtaatcccagctactcgggaggctgaggcaggagaatcgcttgaactcgggaggcagaggttgtggtgagctgatatcatgccattgcactccagcctgggcaacaagagcaaaactccatctcaaaaaaaaaagattgtgacaggtagcttgtttttaatgtttaaatctcaatcaaagattaatgtacacaaaatattagggcaggatgaccccatcaaaaacattactaaactttcagaaagcaaccataggaatataaagatgtataaatttttcaatttaaaataaattaaatactacacagtgaatgaaacaggaacacagacaactactgaagttcagaaaaatgaggataacaataaaaatattaaaaatctcaaaaaacataaattaggaagataaaaatgtcagacaagaagagaatcttgggagctgcaagataaagtaatgtatcatttataaaaatgtcttatgagataaccagtaacttttcaaaaaaaactggaaggcctgaagagaactgggtgatatagtcaaagtcctggggaaaaaaaaaaaatctgtcaagtgaaaataatgcaagtaaaaagaagtggccgggcacagtggctcgtgcctgtaatcccagcactttggaaggccgaggcgggcggatcacctgaggtcagaagttcgagaccagtctagctaacatggtgaaaccccgtttctactaaaaatataaaaaattagccgggcgtggtcacgtgcccctgtaatcccagctactcaagaggctgaggcaggagaatcggttggacctgagaggcggagattgcagtgagccaagatcatgccattgcactcaagcttgggcaacaagagcgaaactccttctcaaaataaataaataaataaataaaaaagaactgtccaactgaataaaaagaaagaccttccaaaataacctaatcctgaaaaagtatattggcacttcatatgccctacataccaaagatgctgaaaggagttcatcccactgaaaataacatgatgcaggaaaacacataatcatacaaaaatacataactttctgggaaagatatttacatacacaaaaacagaattccttagcattttaataatcatgcagaaaacattattaatttttctctaaaatttaaaagataaaagcatagaaatgattataaacatctgttaatgtaacataaaaataaataattagtggccaggcacagtggctcatgcctgtaatcccagcactttgggaggctgaggagggcggatcacctgacgtcaggagttcaggaccagcctggccaacatggtgaaaccccatctcaactaaatatataaaaattagctgggcgtggtggtgggcaactgtaatcccagctacttgggaggctgaggcaggagaatcgctttaacctgaaaggtggaggttgcagtgagccatgattgcaccattgtaatccagcctgggtgacagagcaagactgtctctcaaaaaaaatgaataaataaaaatttaaaaaatatatatgtatataattagcaacatcagtaacaaagtagagagcagatataatgagaaagaatttttgtatgcaaataaggtatatatatatatatatatatatatatttttttttttttttttttttttttttttcagatggagtctcactctgtcgcccaggctggcatgatctcagctcactgcaacctacatttcccggattcaagcaactgtggtgcaaataaggttaatttttactacattaaaattgttttattttctaaagtttttatgtaattcccaaggtaccacaaagaaaatatctgtatagatacataaaagaaaataagaaagaagtgaaagcatattaatacaaaaaccaaaggacacaaaagaagacagagggaaaatgagggacaaagatacaagaattaaacaatagaattaataaaattacattagttactctttcagaaaattatttaaatatatataaaattaacttttcaatctagagacataattttcaacgaaatgatttattaaaatctttcaaataccaagattcatttgcctttttgcaagtcagttgaaacctaatgataaaaaaagactgaaagtagcaagatgaaagtagaaattttatgtaaatattaaccaaatgagagaagaagaggtcaaaataatattacacaagctacatcttaagtcaaaaagtgtcatatttaacaacatgtactttaagtgaaaactctgaaaagagaaaaaaggacactgaacaatagtagtttcatttactgggaacaaatgactagtgtgtgtgtgtgtgtgtgtgtgtgtgtgtgtatgtgtacagacgcacatctcacatgagggtttcaaatatataaaacaaatattgacggaattgaagaaacacacagagagcaatataattatagtagaatatattaagaccccattttcttaataaaaataaaacaagatggaatattagcaagggaatagaaaacttgaaatcagtatggaacaattatttctaacagaggtatagagagctgaacatcaggatacacacccttcccaatagttcatacaacattctccttgaaaggaccatctgttaggccaaaaaaaattcttaacaaattttttaaaactgaaattttatgaattactttctgtgaccaaaatggaataagattataaaacaataatttaaaaaacggaaaaattcacaaatatatagaaattgaacaacacacttttgagtgtgctgttgttcaaaggttgaaataattaatattgtgtagatgtccatgctgctgaatgtaatctagagatttaatgtaatgtctttcaaatttcttattgcacttctgaagaaatagaaacagcaaccccaaaagtatatggaatctcaagagactatactcaacaatcttcaaaaaaaggaacaatgttagaggtatcacagttctttacttcaaaatacatgacaaagctacataataaaaacaattttgtgtgaatataaagataagaaagtagactaataaaatagaatccagcacatgaactttcacatatatggtcatataaagagtcatttgcttacccataattattgcagcactgttactgaaagccaataggtaaaagcaatgcaaatttctgttacaaaatcatttagtaaatataatttgaaatataaaaacggaatatcactcagtttgcaaacagcagaaaatattataacaactataaagataaatcttaacattatgcaaaatgaaacgagccagtcacaaaaagacagagattgtatgatatgtctaacagttacactctgaaacagaacaagaatggtgtttgaaaagtgagatgaaatgggaataattggtagttgtttaatgtatattaagatttagctttacggccaggcagtgctgtactcccagcactttagggggccgaggcgggtggatcacgaggtcaggagttcaaggccagcctggccaagatggtgaaaccccgtctctactaaaaatacaaaaattagccaggcatggtggcgggtgcctgtaatcccagctacttgggaggctaaggcagagaattgcttgaacctgggaggcagaggttgcaatgaggcgagattgcaccactgcactccagcctgggtgacagagtgagactctgtctcatacacacacacaaaaaaacagatttagctttgcaagataaaaacattttagcatatgttgcataccaatataaatataattaatatgaataaactaaatatttaaaaatcttttaggtgaggcacagtggctcatgcctgtaatcccagcacttggagaggctgagacagatgggtcacttgaaatcaggagttcaagaccagcctggccaacatggtgaaaccccatctctactaaaacaacaacaacaacaataacaacaacaaaaaattagctaggggtggtgatgcacacctgtaatcccagctactcagaaggctgagtcaaaataattccttgaacccaggaggcggaggttgcagtgagccaagatcacaccactgcactccagcacaggagacacagtgagactccatctcaaaaaaaaaaaaaaaaattgtttttttaattctaaattttgctgtgtttttgacaagtaaaagtaaacaataatacttagataaagttatcatagttttaaaaatatctttaaatccaaaaataatagagattcacaaataaattgaatgttaatattagaagaatttctaacactattcacttagacaggattaaacaactattcacaacacacctacacaacaaatacacaagttataacaaaaatacatggataggctgggtgcagtggctcatgtctgtaatccaagcactttgggaggaaggcggatcacgagatcaggagttcgagaccagcctgaccaacatggagaaaccccatctctactaaaaatacaaaattagccaggcgtcgtgccactgcactccagcctgggcaacagagcaagactccgtctcaaaaaaaaaaaaaaaatgctgggcacggtggctcacgcctgtaatcccagcactttgggaggctgaggcgggcagatcacatgaggtcaggagttggagaccagcctcaacatggagaaaccccatctctactaaaaatacaaaattagtcaggcatggtggtacatgcctgtaatcccagctactcgggaggctgaggcaagagaattgcttgaacctgggaggcggaggttgcggtgagctgagatcgcaccattgcactccagcctggacaacaagaacgaaactctgtctaaaaaaaaaaaaaaacaaaacagggataatatttacacaagcaaacagagataattatattggcagtagacatatggctgattcatatttaattttgcttgacattgtcttaaattgcattgagttaatcattgtcatatacaatttattattattatttattattattttttgagacagagtctcgctctgtctcccaggctggagtgcagtggcaccatctcggctcactgcatgctccacctcccaggttcatgctattctcctgcctcagcctcccaaatagctgagactacaggcacccaccaccaggcccaggtaattttttgtatttttagtagaaacaaggtttcactgtgttagccaggatggtctctaactcctgacctcacgatccacctgcctcggcctcccagaatgcttggattacaggcatgagccaccatgcccggcctgtcatacacaattataatacaaactcaaatatcaaaacacaatttattggtgtgaggtggcataacctaaaaaatataactcaaaaatataaaattgcaaaacaaaattaaaatatgaaatgtaaaacttattggacactatcaagtagattaatatattcatgaaagaaatcctagaaaaagaatacagagaaaaagtaatatgaggacatttcaagataaaaacaacctgagagccaggcacggtggctcacccctgtaatcccagcactttgggaggccaaggtggacatatcacttgaggtcatgagttcaagaccagcctggccaacatagtgaatcccgatctctactaaaaaaatacaaaagttagacagggtgcggtggctcatgcctgtaatcccagcacttagggaggccaaggcaggtgtttcacaaggtcaggagtttgagaccagcctggccaagatggtgaaaccccatctctactaaaaatacaaaaaaaattagccaggcatggtggcagtcccctgtaatcccagctactccggaggctgagacaggagagttgcttgaactcgggaggtggaggttgcagtgagccaagatcaagccactgcattctagcctgggcgacacagctagactccatctcaaaaataaaacaaacaaacaaacaaaaaaaaattagctgggcatggtggcacgtgcctgtaatcccagctactcaggaagctgaggcaggagaatcacttgaactcgggaggtggagattgcagttagccgagatcacatcactgcactccaacctgggcaacagagtgagactttgtctcaaaaaagaaaagaaaaacctaagaactttccaaatgttgatgtgataaaaaaatatttctaaccaataatacttgatccaaaattattttactttaaaaacaagataaaaataaagactccataataaaaggtgtgggtgttcatcactacaagcacagtcctatgaaaagtactacatggtgtccaggcactgtggttcgggcctatgaatcctacagttttagcaggccaaggcagccagatcacttgagaataggagttcaagatcagcctgagcaacatagtgagactctgcatataaacaaagagaaatattaaaatgagtccatttttttgaaaattaaaatgatgctggccagcatcataaaaccatatataaaataaagctctctattaaatgtaaatatacagacacatatagaattatttactatcataatgatggtacacaaaatccttaaactacttctatagaatatgaaatataaaatataaatctgttagtagatgcatagtataaaataatcttcaatatcaataactactgaaaaatataaaggtatagcttttgtattaaattgaagttgttacgagattaaaatatatcattttagttttggctgggtgctgtggctcacatctgtaatcccagtactttgagaggctgaggcgggtgtatcacctgaggtcagaagtttgagaccagactgcccaacatggcaaaaacccatctctactaaaaatacaaaaaattagctgggtgtggtggcaggtacctgtaagcccaggtacttgggaggctgaggcaggagaattgcttgaacctgggaggtggaggttgcagtgagccgagatcatgccattgcactccagcctgggtgacagagcaagactgtgtctcaaaaaaataaaataaaatatattattttcatattaaaatgttttatgtaatctccatttctcaagacaattacaaagataatatttatcgaaagtataaataaggaaatggaaaaataaccaaagcatatcactacatagaataaacaaaaataaaagcagcacaacaagaaatgagaaaaaaaaatctacaagaaacacataacaataacagtaaaactggtaatagcaactctattttaaagcaatcattttaaatactaattaattaaactacttaatagaaagaaacataatcctaggatgttgtgaggtcaaagtgggctgatcacttgatcccaggagtttgagatcagcctgagcaacatctcaaaaccctgtctctacaaaaaaaaatacaacaaaacttgctgggtgtgatggcaaatatttgtaacacagctatttgagaggccgaaatgagaggatcatcagagtttggaaagttgaggctgcagtgagccatgatcatgccactgaaaaccaggctgattgacagagtgaaaccctatttcaaaactgaatgaataaataggccaggcatggtggctcatgcctgtaatcccagcattttgggaggccaaggtgggtggatcacttgaggccaggaatttgacactaccctggccaacacagtgaaaccccaattctactgaaaatagaaaaaattagatgggtgtggtggcacatgcctgtaatcccagctacttgggaggctgaggcatgagaatcacttgaatccaggaggtggaggttgcagtgaggcaagatcacgctacagcactccagcctgggcaatggagtgagatcctttctcaaaaagaaaaaaaattaaaataaatgaataaataaataaaattataaaaaagaaaaagaaataaaacatctgagtaactggaaaaaagcatacaatatgctgcctacaagagactggttttagcattgcattgaatagactgaaagtaacgtaatagaaaaaatttatttttcatgcatatagtaaccacaattgggtaaggtagttataattatattagacataatatgcttttagtcaagtactagcatgagaacaaaattgatattatataataataaaataggtcaatttaccaggaatctataactattatatctctctctatatatgtatgtatgtataaaacataagagctgcaaaatatataaagcaaatactgacaaaagtgaagaaatacttagcaacataataactgtaaacatcaacaccccatttgccataataaataagaaaataaaaaactcagacattatagactgtattaattattttacctacagaggaatacctgagagtagataatttataaagaaaaaaggtttatttggctcacagttcagcagactgtacaggaagtgtgtgccagcatctgtttctggtgagtaagggtcctagtaagcttataatcattgtggaaggcaaagtataagtggacacatcacacagtaagagacagagtaagtgtgaggtgaagaagccaggttttttttttttttttaaccaaccagctctcatttgaatcaatagagcgtaacctttttgattatcaaaaggatggtgccaaaccatttatgaggaatttgctcccccatgacccaaacaccacccaccaggtcccacatcaaacaggaggattatattgcagcatgaggtttagagaaaatggacatcctctaaccttaggccaaccatatcatatcaccaactaggcttaacagatatgtacaaaacttaccaggcaaaagcaagagaatacacacaatattcttacttgctcctagtgtgttctgttacgacacataccaagtcttattaaatttatgaatactggctgagtgcagaggctcatatctataatctcaacactttgggaaaatcacatggggcaaaaagtttgggaccagcttacacaacatagtgagaccctgtcgctactaataaatcaaaaaattaaccaggggtagtagtgcatttctgtagtcccagctcaaaaatttgaggtaaaaggatcacttgagcccagcaggctgaggttgcagcgagccaaaatcatgtcactgcactacagcctgggcaacagagtaatatcctgtctcaaaataacaacaaatacatttaagaagaccaaaagtatacactatgttttctgaccaaaactgaaagaaactaggcattaaaagccaaagtaaaactgggaaatccaaaaatataggaaattaaaacacactcttcaacagattcttttttttttttgagatggagtctcgctctgttgccaggctggagtgcaatagtgtgatctcggctcactacaaactctgcctccagggttcaagcaattctcctgtctcagcctcctgagtagctaggactacaggtgcgtgccaccacgcccagctaatttttgtatttttagtagagacagggttccaccaggttggccgggatggtctcgatctcttgaccttgtgattcgctcacctcagcctcccaaagtgctgggattacaggcgtgagacactgcacccagccacttttcaacatattcttgctccagggtcaaaaaatttaatttttcaaagacattactatgacctaacagtggtgaatgaatttaatataatctctataaaaaccctaatcacacagttttttacagaaatatagtttatttttttatttttattttttttagatggagtctcactctattgccaggctggagtgcagtggctgtagtggcctgatctcggctcactgcaacctctgcttcctggattcaagtgattctcctgcctcagcctcctgagtagctgggaatacaggcacccgccaccacgcccagctaattttcgtatttttttttagtagagacgggatttcaccatgttctccaggatggtctctaactcctgacctcatgatctgcccgcctgggcctcccaaagtgctgggattacaagcgtgagccaccgggcctggcctaaaatttttaaatttgattacaaactatagataaacacccttgaaaaagaacaaagaggcattatactttctgatttcaaaacatattaaaagctacaacaacaaaacaatgtggtactgacacaaagataaacagatgaaagaacagagagcccagaaatgaactcttctgtataagataaaataaccttccacaaagttgccatgagcatacaataaagaaaagatattctcttcaaaaaatattgttgaaaactggaaagcgacactgatgaaataaagttggatcatttccttgaacaaaatacaaaaaatatggtttaactaaatacttaaacatgaaaagataaataacatctcttagaaaaaacataggaaaaagtcatgtcattggtcttggcactatttttttagatatgacactaaatgcatgagcaacaacaacaacaacaataaccattaagatttaactgcattatacttcaaaatttctgcacatcaaaacaaaaattcaatagacaatgcctcctagaaaatgggtgaaaatatttgcaaatcacaagagatgagtgatgagttaatattcagaatatataaacaactcttaaaactgaacaataaagctgaataacttgatttattaatgaaaaaataattgaactgaattttcatttaaaaagatacccaaatgggaaaaagtatttgaaaagaaaagcaaaattaataatttatagagaaacacataaaaaagaaaaatgaaatcacctcacacccattacaatggctactgtaaatttatgaaaaacaccaaatctgttgataatgcaatgaaaataaaacccctgttgattgttggtagaaaacaaaagagcagctattgttttaaaatgttacaaatattggccgggcatggaggctcaggcctgtaatcctagcactttgcgagaccgaggcaggcagatcacaaggtcgagaattcgagaccagcttgaccaacatggtgaaaccccatctctactaaaaatacaaaaattagccgggtgtggtggtgcacacctgtaatcccagttactcggaaggctgaggcaggagaaatcgcttgaacccgggaggcggaggtttcagttagctgagatcaggccactgcactccagtctgggcaataacagcaaaactccatctcaaaagaaaaataacataacataacataacataacataacataacataacataacataacataacataaaacataacataacataacatacataaaataaaataaaataaaatataaaataaaatataaaataaaataaaatataaaatacaaaataaaataaaataaaataaaatataaaataaaaaataaaataaaataaaataaaatataatataaaataaaataaaataaaatacaataaaatacaataggaattacaactatccaagccccttgtaaccagccaactaaaggtggaccccagcacagaaactgcaggcttgagaccaagctactacccctctccacaaacccagagggcatcccagaaccctggcagcccaaaaaagaagatcttgtctgggcgaagtggctcatgcctgtaatcccagcactttgggaagctgaggcgggtggatcacaaggtcaggagttcaagaccagccttaccaacatggtgaaaccccgtctactaaaaatacaaaaattagctgggcatggtggcacaagcctgtaatcccagctactcgggaggctgaagcaccagaatcacttgaacccgggaggcggaggttgcagtgagccgagatcacatgactgcactacagcctgggtgacagagtgagactcagtttcggaaaaaaaaaaaaatctttaccttctgaaatcagtttatcagtttataaaaagttgaagaggcatttgcattttcaaatttacagacaccaatgccaaactatattgtgcccacttgtcaatgcttctcttttaacataacactgaaaatatgtggcagaagaattagtcaaaaaataaaaaacccattgaaattgaagacaagtaaaatgtttgtttgtagatcataaaatcttacatataaaaatacataaacagtacattaaaacctatctaataaatacactcagtaaattaccaaatataaactcaacttataagttatcattctataaacctaaattgtctaataaaataaaggaagaaagcaatattatttataatagcattaaaataatatatttctgagaacaaattcacccaagaaagtgaaaaaaatctttacaataaaagatataagatttcaatgatgaaatcagagaagacacaagttttaaaatatttaatatctatggatttaaagaataaatattgttaaaataccatattatccaaagtgagctatagattcaagaaactccctaccaaaattctagtggcatttttttcatagtaatagaaaatacaatccctaaatttacatgaaactataataaatcttttttttttttttttgagattgagtttcactcttattgccaaggctggagtgcagtggcacaatcgcagctcacagcaacctctgcctcccgggttcaagcaattctcctgcctcagcctccagagtagctgggattacaggcatgcaccaccacacctggctaattttgtatttttagtggacacggtatttcaccatgttgttcaggctggtcttgaactcctgacctcaggtgatccacccatctcggcctcccacagtgctgggtttacaggagtgagccaccgtgcccagcccagtaaatctttttaagagacagggtctccttatgttgcccaggttggtatccaactcctaggcttaagggatccttctgccttggcctcccaaagtgataggattacagctgtgagccactgcccccccagccaaaactacaagaaactgaatagtcaaagcaatcatgaggaataagaacaaagtgaacatcatacttttaaatttcaaactatatttcaagcctgtagtaatacaaataagatgaaatgtgcagaaaaataaaaaaaacaatggaacagaaaccacaactcttacacatttcagacatgatgcaaaaagagaacttacaaaatagtttaacacagagtttctcaaaattatgcagatatttctgagtctccaaaaacaatggaaaaaaaaagtcagattgtgcaatctcttatatgccatgaagaggactttagctcactgtaaacttgaaggaagatcgctgaagggaaagtagaatttttaaagaatttaaaagcataagacagaagacgcccctatattaaagttaaaaaaacaaaacagctgcctagaaactttggaacacagatttccaagtcaaattttaaggactggttttctcttttacctttggacctcacatctgtgtcatctgttgtgttcactctcacctacctgggggtttggctgccatctcgtgtctcttcatattccagggctcttttccttgctccagacaggtgatcaggtctaaattagacacagcaatacctgttttattaaaaataaataacgtgaatcttgctcatattctccaattaccaacctagtaattttctcagtaaagagaatgtaggccaggcacagtggctcatcctggtaatcccagcactctgagaggccgaggtgggtagatcacctgaggtcaggagttcaagaccagatgggtcaacatggcaaaaccttgtctctactgaaaatacagaaattagctggatatggtggtgcacacctgtagtcctagctactcgggaggctgaggcaggagaatcactagaacccaggaggcaaaggttgcagtgagctaagattgcaccactgcatccagcctgagtgacagagcaagactccgtctcagaaaaaaatattttaaaaagagaatgtaatagaatattctagtatattaatcacaaaatatattctagtaaattaatcacaaaatactaacttataacaaaatttctaaatattaagaaaatattttcaatttgtatgttcttaattttactactcagtgctactgaatcaaaaattggtggtggcaattagattttaaggtgtgggcaacagtattttatgccactaaatttctggaattaccactaatctagagtgaaggatacagatcagctcagaaacgtggaaagttcaggtcagggtgaaacatctacacagataaatcctacattttcttaaaaacaggtagttgaaactcatttatgtaagcataaattgccaaaaaaacacgcaacaaaaaagagaaataaaacctttagagtatattaggaattgtatattaaagttatcctcaccttgccgggcaaggtggctcacgcctgtaatcccagcactttgggaggctgaggcgggcagaccctgaggtcaggagttcgagatcagcctgaccaacatggtaagaccccatctctactaaaaatacaaaaattagccgggcatggtggcacatgcctgtaatctcagctacgcaggaggctgaggcaggagaatctcttgaaccctggaggcaaaggttgcaatgagccaagattgcgccactgcactccagcctgggtgacagagtgaaactctgtctcaaaaaaaaaaataataataaataataaaaattaaaaaaaaaaaaacttatcctcacccaggaataccaggtttctataattctctaacatgacattcctatataaattctgctgtgctgtgtccaggcactgccactcctccagagagaattctatggccacatccataaatgtcaatggtccctgaaaaacacatacacacacacatatttaccaagtggttatggacagaatttttaatttgactcaaggtgaaatgagagagtaaagagaactggttctgacttataggagtgactgaaattatccaataaaataattttcaacacagaaatattctcgaatgtattctctaactctgaaaaaagagagtagtataagatccacaaaatcagtgtatatatgttacttttctgaatgataaagtataaacttaagggcatgaacagaaacatgtacattttttattgctatatatacatcatacagaatgacttgtgtatatttttcagatggaaaagacatgttgagttagaaagtgcttctcaaattttagtctgtaaaataaactggagatcttgttagtggagattattttttcagaagatctggaataaagtctcagtttttaaatttctaacaagctcaccaataattccaatgtttttggcccaaaaagaatattttgtcaaacatcccgtaagtaaaagggcctgtgtttttttcagttttacttacctgtacagaaagataagagctttcattttccaaagacatatgtatacaaggaaaacctaagaaaaagtcagctcccagataaaatatgatgatttatgcacattagctgcataaagatacttaataatgaacagaaaaataattaactctatggtgaaaaaatctttcagagagctctttaaccaaaagacttattttgtctttttttttttaaccgaaagaattattaacatcaactgcactaggacaaatttttatgatgtgctaatgcataacacagaaggacacagcaccactgctggaatattccccccaaaagtgaattatagtctgaatttaaccataaagaaaacatcagttctgtgcaaagttcaagataaacatatctttcccgttttaatttttaataatgattttaggtagacatcttgagaatatgcctttaaaggtgtcagcaccacctgtttacctgataccaccacatccacaagcaaaaagatgaagacttgcagaaaaagtccacccatttctgtccttaataacagaagagatgcgggaaaaacacgctgcaccatggaaataaagatataagtttcatttttcctgtcctcaggtgcccttcccttacatggacaccaacaatttctgctacagtaataaaaatatggaccacactgtcctctccctaccaaacccaaacagaaacagccctatggccacccttttagtgcaaaggtgagacttaactcttatgaatgtatctgaacccctcatactcaattctagcctcatgttaaaatcacatgaggcacttaattaaaacaacatggggccaggtgcggtggctcaagcctgtaatcccagcactttggggggccaaggggggtggatcttctgaggtcagaagttcgaaaccagcctggccaacatggtgaaaccctgtctctactaaaaacacaaaaattagctgggcgtggtggaacgcgcctgtagtcccagctactcgagagggtgaggcaggacaatcgcttgaatgtgggaggcagaggttgcagtgagctgagatcgcgccactgcactccagcctggtgacagagcgacactccatctcaaaaaaaaaaaatacaaaaattagtcaggcacggtagcatgcacgtgtaatcccagctacttgggaggctgactcaaggagaatcacttgaacctggcaggcagaggttgcagtgaaccaagatcaagccactacactccagcctgggagacagagtgagactccatctcaaaacaaacaaatacaacatggatgtgtccacctggagcaataaacagagcctgtgaggaggggtgaagtacagagatttctgcaaactggctgtgtaatcctaatgagaagcctgggctgataaccacttagccaagcattgcctctcaagctttagtgagcttaaaattcacttggtaattttggacccactctacgtaatgggattctgcaggtttggaaaggatccatggataaatgttttaaacaagacccctgtcaatgttaatgttgctcccccgggctcattattagcagtagttagagaaagcaggcacagcacagagtcccttacactcagcactcttgtcacaacacaagtatttctggtacaaataaagacaacccatcttcatcctaaagtttcatattatttgctggctcttcaaagtttacaaaggaaacagaaggcagcaatgtctgaataagtctgcatttggaaaacaacatgtactaatgcaaggtgtattaagcaggcgctatgtgctctcaagggtatgctacaggctgagtgcagtggctcatgcctgtaatcctaggaggcaggtggatcacttgagatcaggagttcaaggtcaacctggacaacatggtgaaacctcatctctactaaaaatacaaaaaaaaaaaaaaaattagccaggtgtggtggcatgtgcctgtaatcccagctactcaggaggctgaagtgggagaatcgcttgaacccaggaagaagaagttgtagtgagctgagattgtgtcactgcactctggcctgggtgacagagcaagaccctgtctcaaaaaaaaaaaaaaaaaagtatgttacagagcactgtgctgggaataacatattatatgatttaactctcataacatcatgcaagttggtactaagtgtttaataattaccaggatttagataaagagcccagcatttttaactcttctactgtttctctgtcattggttttttaaaaaatgtgtagaaaagccaggcgcggtggttcatgcttgtaatcccagcactttgggaggcccaggcgggcagatcatgaggtcaggagtttgagaccagcctagccaacatggtgaagccccgtctctactaaaaatacaaaaattagctagtcatggtggtgggtgcctgtaatcccagatactcaggaggttgaggcaggagaattgtttgaacccgggaggtggaggttgcagtgagccaagatcatgccattgcactccagcctgggcaacagtgcgagactatgtctcaaaaaaaaaaaaaaaaaagtgtgtagaataaaagcctaatacagacagatgagaggattacagaaagagtttaatgtagttttgaggaatttttactgggtttatatttacttttttgtgacttgtggaacaactactgaatctgcaggaatagaaaacaagttcctaaatggaatgtttctgcaaccttggttttaataaaaaattaagaaattaagaccctaaaatacatattttacttttcccatttatctgcttttgggtttcaggaaattgggagcaccagctctagagaggcagcagaattcaacaaccaaaactctgatctcttctgatcagttctgtgaggcaagactccagggctgggtgagatctaaacaaggccctcaagaagggtgaatctgaacagaactggggaaggggagaccctctgtagaattctgttctctatgccactggggtatttcaagttctgttttttgtaagcttacctaagagaaacttaaatcccagcgtttgcgtaattttaatcttttctagccactgccctgtcaattttataacatatactaataagcaatttaaacaaatctcttaaggttttctagggtaatattattagaagataaatatgtattattagcaagataaaagaaatcaaaaaataataatgcttctgtccataaatatcccttcaagtgatgacatcagaagccacaacaatataaataaagtggcccaaataaagctcacaattttttcacacatctatttgctataccaaccatatgatacttaattcaaccatttattcagttgctagtctagactaagagtttctggattgtagaaaccatgactgcttcatctatttttctaatggccatataaaattatagcaatcagtttatctgcttgagtctccagatctcctccttgtttttacccaagtaccagaaaactggagaaattcatctgggtaccaatcaaaaacatcccttgtataagggaaggaacaaacacaggatgactcatttctcttacactgagggaaaagcagaattaaccactcttgtcagcctgacacaattctgctctggacatcctcaaatgtctcaaaaatgcctacgtaattgtgagagggttcccagtgaccctgggctgatggtccaataataagccaggctagagagagtcatgctgattctaaatagaaaatggaactgccctggttgagctccagaattacttgttctgattaactagcttttggatagaaggaaggacaagaatattgtacataacattttacaggcaggtatagttgtggtcatggctccggatactttgtggtcttgatctctcactcctaagatgtttatttatatttacagaatttgccatcagattctgtttacatctggagcctctcacgtaactgtggcagacctgctacaagatcttactggacaaaatctgaaaagctcaaagagccacagtctcaaagggagctgtaggatgtctatgttgacatctcacagtgcagaaaatgccttctattggttttcagtacattcccaattcaaagtctggccctgtcttgtaatcccaggcagaagccagatcttatgtgcagattctaagtgggatcaacctgactctgcatccttaggtgttacagaaagcaaagtacaatcaaaggagagatcccctcagaggccgctctggcacgttccaaatgatgtttacctaaaaggaaatagctgaggaaacatgaatgtaagtatacaatttatttgggccaaacttgaggattgtaacctgggagcaaatattcaagttgcctggaatatatactttgattagcagcagttacaattggattggaaagacaaaaagagaggcgcatagagtgggttgatacaaagttgtctgtcaacatttttttatttacaaaaataaattgattattgattggatatacattgttaggctatagggtgtgggttatagtgtccagtgtggcatttttagttcaatttatagctacttgtggcaatagcaagcagtttcaagtggtaactacatagctcaaagaaaaaagaaagacataattgtggtctcattttaatgtctctctgagacttataaagaaaaggattattagccaggcatggtggtgcaggcctgtaatcccagctactgagaggccaagacaggagaatcacctgaacctgggaggcggagattgcagtgagccgagttcgtgccattgcactccagcctggacaacaagagtgaaacctgtctcaaaaaaaaaaaaaccttttatataggaaatgcaaatccttttcttttcttttcttttcttttttctttttttttttttttttgagacagggtttcgctcttgttgcccctgctggagtgcagtggcgcaatctcagctcaccgcaacttcctcctcccggattctcctgcctcagcctcccgagtagctgggattacaggcatgcgccaccacgcctggctaattttttgtatttttagtagagacagggtttctccatgctagtaaggctggtctcgaactcccgacctcaggtgatccacccgtcttggcctcccaaagtgctgggattacaggagtaagccagtgggcccggcaaagttttcattttttccaagcctcaagatctagattcagaaattggagctgcagattcagattctggatgggtggagtagcagcaggtattacttgcacatttgtggacattttagcaagaggagaaaaaaggaattaaaaattctcatgtctacatatctattcaatgcacacatgttattctgctagggtttttgggccccatggtctctgagtcagcttcaggtctgatgacaggagtccctgaggctgggcacggtggctcacgcctgtaatcccaacactttgggaggctgagatgggtggatcatgaggtcaggagtttgagaccagcctggccaatatggtgaaatcccatctctctttttttttttttttgaaacgaagtttcgctcttgttgcccaggctggagtgcaatagcacaatcttggctcactgcaacctctgcctcccaggttcaagtgattctcctgcctcagcctccccagtagctggcattacaggcgtgtgccaccaccctcagctaatttttgtatttttagtagagacggggtttctccatgttggtcaggctggtctcgaactcctaacctcaggtgatctgcctgcctgggcctcccgaagtgctgggattacaggtgtgagccaccgtgctcagcctttggtgaaaccccatctctactacaaatacaaaaaaaaaaaaattagccaggcatggtggtgagcatctgtaatcccagctacttgggaggctgaagcaggaaaatcacttgaacacaggagactgaggttgcagtgagctaagatcatgccactgcactccagcctgggcaatgcagtgagactccatctcaacaacaacaaaaaagtcactgaaagaggtaaaatggttgattgctgccctgtaaggtttgtagaaatctgatctagcctctctggaagtgactgtagaggacaatagataccaaataggcagagatgcaattcttcctgcatatttagggaagagcgtgcactttgcagcacaattgtgagttgactggaatcctgagagggaaaggcccttctagagtaaagcttggttgacaccttatatatttatatcacgtctggtaattctagactgtgtttggaaaatataacaagagaaattatctccagccccagaaaaacttcacaatgatggaaaagaaagaaaacttttattacacaattaaaccagaatgtgacatgcatcacaatcaatctgcttaagagactgcaaagacagaaagatagtcaccataattagtccacaagtcgaagaatttacagcaccatgtcatacagagctcatcctaaattcacctggtcattggggatgccacctatctatgctaattggttataatcaatgacaaaataaacttttcacatcttcatgacaggaggtagttttgcaacttgacaccaggtgcctgctgaaggtagactctcagtctcctactacaatggttgaatagggtgctatctttttggttatttacactttaaagcaatggctctctatgttctgagcactcagctacagcactcctgcttgccgtctacttatggctagtgtcctctcttgacccctaccatctgccaatgaggcacagcccaaagcacagagctcacagctggcagcttacatcttaagtgagccccaattgccacagcagcactccagtacctcatcagagactgaagactatggtacaggagagcctacaggatttgggggtagaattgcaccttcataataatgggaatgggagtggtgtttcagcctcagtttcaatttattatggtgacttgaaaaaaatactgctggatttccagcatgagtccagatagagataggatggttctccctgtgaaaacccacctctttgtcaacaccaagggatagcattagggcttctaaaacagacatctgaagcattgaagagaaaaacagctcttggtctgattctactgcaaaaattatattgagagaaaaaagaagttaaatgtatcttgagaaaaaactcagattagatatgattgatcaagtcagtcagaaaatattcccctaaaaggaatttctcttaaaatacccctaatgcacagctactcttggcatgagaaacatgagcattatgaagaaaaaaagcatattctcagcagaattttataaggtttctcttccatctctgctgctctcatctcctagccattgaatgggggttccatattgaaatacaactgacaattcaccagcactttttaaattacgaactggaatctgactttgttcatatagtagaatatatgtgagcttgccgcataactaactgaagggctattatggtttttgggtgaccacatcacctgtctatttgtcctggaatggcagcattccaatttagtaaaatgaaagacactaaaattatgcttacctataactatccctattggataaaacaatatgtatgtcagacacatatctactgtaacaatttggtagtattttttgatattagctatataaataaatataaataattttaatgtactagtcataatgtatgtaggatttttaaacattgtctataaccataattcagtttaaacattttatatttcagaagtataaataacaatattaaaatgactgcttaggagattcaaagtaaatattttgatcttatattcatactattgtagaaaatactttttaatttatatgaatgtatgttgtctaaaaacacttcagataactatgctaattgttcttaataaatagaaaccaaagtacaactacaggctccacttttcagtttatacactgaactgttcttgtttttgcagtgtaagtacttcagcctgcaaatattagataattactttggataattagtgttctgtaaaaggaacctagtatgttttagtccttattattctgtattgctaaatttactcctatcattgtgttcaatttgtgtgtgctcctaatatgagttttttttttttaattttttgagatggagttttgctcttgttgcccaggctggagaggaatggtgtgatcttgtctcactgcaacctctgccttctgggtttgagggattctgtatcaacctccggagtagctgggattacaggtatgagccaccacgcccagctaattttgtatttttagtagagaaagccacgcgtggctgaacagatgcttttccaaacaagacatacatgtggctaacaagcatattttaaaaatgctcatcactaattattagaaaaatgtaaaaaaacacccaatgagataccatctcacaccagtcagaatggctactgttaaaaagtcagcaatagatgctggcaaagttgcagaggaaaggaaatgcttatacactgctggtgggagtgtaaattagttcaaccactgtaaaaagcagtgtggcggccagacttagtggctcaagcctgtaatccaagcactttgggaggcctaggcaggcagatgacctgaggtcaggagttcaagaccaacctggccaacatggtgaaaccccatctctactaaaaatacaaaaattagccaggtgtggtagcgggcacctgtaatcctagctattcaggaggctgaggcaggagaatcgcttgaacctggaaggcagaggttgaagtaggccaagatcatgccactgcactccagcctgggtgacagagcaagactcagtcaaaaaaaagcagtgtaacaattcctcacagaactacagaactaaaagcagaattaccatttgacccagcaacctcataacttggtatatacccaaagaaatataaattagtctcttaaaaagacacacacatgcacatgcatatttattgcagtactattcacaatagcaaagacatggaatcaatctaaatgcctatcaataatagactgaataaagaacatatggtatggtcggacaaggtggctaacacctgtaatcccagcactttgggaggctgaggcaagttgattgcctgagctcagaagtttgagaccagcctgggcaacatggcaaaaccccgtctctacaaaaaaatacaaaaagaaacattagacaggcatggtggtgcatgcctgcagtcccagctaattgggaagctgaggtaggaggactgctcaagcccaggagattgaggctgcaatgagcagtcatcgcaccactgcactccagcctgagtgacagaatgagaccctgtctccaaagaaaaataaaataaaagatctaataaaaacaaaatatggcacataaacatcatgaaatactctctggccattaaaaaaaaaaaaaaaaaaagaacagcattatatcctgtgcagcaacatggatagagctggagaccattattgttagaaaagtaatgcagaaggctgggcgcggtggctcacgcctgtaatcccagcactttgggaggccgaggcgggtggatcacgaggtcaggagatcgagaccatcccagctaatgtggtgaaaccccgtctctactaaaaatacaaaaaattagctgggcgtggtggcgggcgcctgtagtaccagctactgtggaggctgaggcaggagaatggtgtgaatccgggaggcggagcttgcagtgagcagagatcgtgccactgcactccagcctgggagacagtgagactcatcttaaaaaaaagaaaagaaaagaaaagaaaagaaaagtaatgcagaaacagaaaaccaaatgcatgttctcatttataagtaagagttaaataataagaacacatggacacaaagtggggaacaacagtaactgaggcctacttgagggtggaaggtggaaaaacaaagagggtgtgggcattgtggctcacgcctgtatgccaccacattgggagaccaaggcagatgaatcacttgaggtcaggagttcgagaccagtctggccaacatggtgaaaccccatctcaactaaaaatacagaaattagcctggcatggtgatacacagctctaatcccagccactcaggaggcaggagaatcgcttgaacctgggaggcggaagttgcagtgagccaagatcatgccactgcattccagccagggtgacagagcaaggcttgaaagaaaaaaagggaagagaagggaagggaagggaagggagaggatggggaggggaggggagggggaaggagggagggaggtgagagagagagagaaaagaaaaaagaaggaaacaaagaaagaaagaaaggaaggaaggaaggaagaaagaaagggaaaaggaaaagagagagaaaattagaaaaaaatacctatttggtgctatgcttagtacttcagtgaaaaaataatttacacaccaaacattcatgacacgattttacctatattacaaacctgcacatgtaccaatgaatcaaaaatagaagttaaaaggaaaaaactccatggataagggagagtgcaatatagatggaaggactggtttgtgcctgggtggggctgtactctaatttatttctctgttcatacaggcaggtgagattatgaacaggtggtccagaaccctaggttggtggagaaaacaggttgctggtgcagattcagtgtctgggggtgcggatatgccaggagacttgtagacatgtttgtgagtttgtagcaagaaacaccaggatcaaaaatgctgtggtaaaattcctgagggtggtgcctagtcctgggaataagtgtggacacgtcaatgtctaatgggtatgtttgtgagtggctgggaatcctgtggtggcagctgtgggaaaagggggtctgtcatcagagctcatattctttttttttctttctttccttttttttttcttttgagacagagtctagttctgtcacccaggctggagtgcagtggcgcaatcttggctcattgcaacctctgcctcccgggttcaagtgattctccttcctcagcctcctgaatagctgagattacaagaacgcaccaccatgcccagcttattttttctatctgtagtagggacggggttttgccacgttgcccaggctggtcttgaactcctgagctcaggcaatccacccgcctcggcctcccaaagtgctaggattacaggcgtgagccacggcacccggccagagctcctattctctaatttttcagtcctctctcaccctgggagaactgaaatcacaggacaatgggcagtgtgacagcctgtgtacaggagagcagagcgtcccattcccagacatccagagttttattccaggtcaggcccccgtatcttttttctggcaccaaatctgcagtttactgaaaaccaagcaattctctaacactaactcattgtctaacattttatttctgacaccacccagtgtcagcacaggccctgactcagtcccacactgtccttacggcagatgccaggcacaaactccatgggcccatttacatttctgagctactgtttaaaaattgaggactcccataacctttttcaagttcaataatttgataaagctactcatagaactcagcaaatactgtagttatatttaccagtttattataaaagatacaacccaggaaaagtcaaatggcagacatgtatagaacaaagaaaggtggggaaagatgacacacatagacaatccagataaataactgtgattaataaaattcttcattgtttgtgttctccaggaacagtttatcgaaagaaacacccttcccattatgacttagatggtgctctcttttcttatctatcacatagcagacaccgactctgcacattttttttcttattgaaaaatcagttgaatttgacttcagtggtgaaaataaaatacttcttaaggaaactttacttaagtttgtctttttccccaaggcttctgaactttacaaacccattttatgtaactccaaagaacaggctgacttcagtgtgaaacattctctgatctaaaatctgattttttcaccctgcatttgccattccccttccacctcctttctaatcttgtttgttcctccttaggaaaggaagcctttgtctgcctgaactttgcaattcttaaagaccttgtagttggtacttctgttgcaatatttctttggaagtcaaaatttttatgtaaattcaaccttgttttattttcaaagtctataaactgcctcaaaacaagaacaacttcatcttcagtaagaccctcccaatcccctttcattttaacatcaactgcatccacctgtgggtccccagctttccagggctctgtagcttctcccaggataaagacttctatggctggggtgagcaggctgggatatctacagaggagactccccagaaaaaactaactgggcctttaataaaatttttttgcaggctcaatattagccttagctctgagccagtgggctaaagctttaatttccatgtcaagagttattcacttggtctttgaaacttaagtgtttagccgggcgcagtggctcacgcctgtaatcccaacactttgggaggctgaggcgggtggatcacaaggtcaggagatcaagaccatcctggctaacatggtgaaacgttgtctctactaaaaatacaaaaaaaaaaattagtcgggcgtggtggcgggcacttgtagtccctgctactgggtaggctgaggcaggagaatggtgtgaacccgggaggtggaccttgcagtgagctgagatcgcgccactgcactccagcctggctacagagcaagactccgtctcaaaaaaaaataaacttaagtgtttaaaaaatccagcgtttcttggctgggcgcagtggcttacgcctgtaatcccagcactttgggaggccgaggcgggcagatcacctgaggtcaggagtttgagaccagcctgaccaacatgcagaaaccccgtctctactaaaaatacaaaattaaccaggtgtggtggtgcatgcctgtaatcccagctactcaagagactgaggcaggagaatagtttgaacccaggaggcggaagctgcagtaagccgagatcatgacattgcactccagcctgggcaataagagagaaattccatttcaaaaaataaaaaaaaaatccagcagtttctcaaacacagtgttgacataagagaagaaaattttagggtgcttatatttcatatctcaataagaaaagcaaaagtgtccattcctttcaaacaataaatgcattattttattatttccattaaaagtcatatagtaaacaattagtcatatggaaacatgtctaggaggtaccaagtttcaaataaaatttagcttaaaactaggaaatcaagataacaggatttgaacagagatattcactgtcacaaatttaccctgcaaaaagaggagctgatgctttcatgaatctatgtaactcagcaattatctaccacattttcttgtgaaaatgtactcattttctacagccaaaatgggaaagacatttcccctattctttttcttggtagcattcttaaacagccttgaaattttattggaaattaccaagccataaaaaatacacctgacactgatgaaagaaatcatagatggcacaaacaaatggaaacaaatcccacgctcatggataagtagaatcaatattgtgaaaatgaccatactgccaaaagcaatctacaaattcagtgcaatccttatcaaaataccaccataattcttcacagaattaaaaaaaattctaaaattcatgtggaacaaaaaagagcctgcgtagccaaaacaaggctaagcaaaaagaacaaatctggaggcataacattacctgatttcaaactacactataaggccatagtcaccaaaacagcatgttactggtttaaaaataggcacatagaccaatggaacagaatagagaacccagaaataaacccaaatacttacagccaactgatcttcagcaaagcaaacaaaaacataaagtggggaaaggacacccttttctacaaatggtactgggataattggctagccatatgtaggagaatgaaactggatcctcatctctcatcttatacaaaaatcaactcaagatggattaaggacttaaacctaagatcggaaactataaaaattataaaacataacattggaaaaacccttctagacattagattaggcaaggatttcatgaccaagaactcaaaagcaaatgcaataaaaacaaagataaatatcagggacctaattaaattaaatagtttttacacggcaaaaagaacagtcagcagagtaaacagacaacacatagagtgagaaaaaatcttcacaatctatacgtctgacaaaggactaatatctagagtctacaacaaacccaaacaaatcagtacaaaacaaacaatcccatcaaaaagtggactaaggatatgaataaacaattctcaaaagaaggtatacaaatggccaacaaacatatgaaaaaatcctcaacatcactaatgatcagggaaatgcaaatcaaaaccacaatgcgataccaccttactcctgcaagaatggccatgatcaaaaaatcaagaaacagtagatgttggcatggacgtggtgaacagggaacacttctacattgctggtgggaatgtaaactagaaaagccactatggaaaacactgtggagattccttaaagaactaaaagtaggattaccatttgatccagcaatcccacaattgggtatctacccagaggaaaagaagtcattattcgaaaaatatacttgcacacgcatgttcatagtggcacatttcacaatagcaaaatcatggaaccaacccaaatcctcatcaatcaatgaatggataaagaaactgtggtatatatatacaatggaatactacacagccataaaaaatgaattaacagcatttgcagtaacctggatgagactagagactattattctaagcaaagtatctcaggagttgaaaaccaaacatggtatgttctgttatgtgggagctaagctataaggatgcaaaggcataagaatgatacaatggactttggggatttgaggggaagagtggaagggggacgagggataaaagactacaaatttggtgcagtgtataatgctctggtgatgggtgcaccaaaatctcataaaataggctgggcgcggtggctcatgcctataatcccaacactttgggaggccatggcgggtggatcacttgagatcaggaatttgagaccagcctggccaacatggagaaaccccgttctctacaaaaaatacaaaaattagctgggcatggtggcacgcccacctgtaattctagctacccgggaggctgaggcagaagaattgcttgaacccgggaggcagaggttgcagtgagccaagattgtgccattgcactccagcctgggcaacaagagcaagagtccatattaaatataaatataaatacatatatatttgattatatatatattcacaaaaaatacatctgagaaaattcctaaacttactctaagaaaggaaaacttaaatgagaatttctcacaaataaaatacatgattaatattaattttttctgaaatccacctcttttatgccctctgttaatattttcttaccttccaagtcctattaataaaatgcaatttacagttaaataatggaagtcaacataagtgaacaaatcttttcaaggtgacaaacccagggagtggtagtgctaattagaaaacagatgtgtctagaccgggcgcggtggctcacgcctgtattcccagcactttgggaggccgaggcgggcggatcacctgaggtctggagtttgagaccagcctgaccaacatggagaaaccccatctctactaaaaatacaaaaacattagctgggtgtggtggcacatgcctgtaatcccagctactcgggtggctgaggcaggagaatcgcttgaacctgggaggcggaggttgcggtgacccgagatcgtgccattgcactccagcctgggcaacaagagtgaaactccacctcaaaaaaaaaaaaaaagaaaagaaagaaaacagatgtgtctgactgatattcacccaccccattctgctcaccttaagtgctcaataaccaccctctcaggagacattacactatgccccaggtgcattttactttgtaagttcttgcaccatctcacttgggtcaggtttttctttgtcttttgggatacttttttttttccacaaaatttagagaattcagggggcagaaattatttctgtgttttcccctcaataccagcatctgattggctgaccagcactgtgtctccaagaaatggaagctgggttgggtgaagacaatcttaatgtctcaaggggttagcttttcaaaggaagagtatgccaggagatgcctctcagccccagggcatccacctgctcccttgagaagctacactccatacctcaggttgtcctcagggagaaaaatgacccaggagctgatattcactagacactctagcagaaaaagtcatgatgtgtatcttggtttactccagacagtactgaaacccaggaccaggaaaaaactgaagggtggctgaagacacatcactccgtaaagtttccaaagaaaaaccttcacctgaaaacaaacattctgataagatttctgtgcctgaggaagataaaaaaaaaaaagccatagaaatttcataaaatacagtgtcagggaattattttttgctttcttctcatgagaaatattttcaaccagaaaacaattttaagtgccatccaatgctttgtcaaaaaatgattaactaaaatacagtatcaaaaatgtacactaaaggaaaaacagttgagaatgtgaattaggaaaggcaagctggcatttggaaatgtcagaaggaactagaaatttagtattttagtttatttgcagtttaaatctaactgcaggccagagttaggctggaggaatggggctgggaggtacacttgagaccccgcttggaacgcatgtgaaaaatgcaggggaaaatcagtcccctgtggagtgtgagaataattaagtggcaggcaattacactgaggaggctctagtccccggctttctacttaacagcaacagctacgtaaatgtacctaaccgattattaaatatagttttcttcatcatgcaccttataaaaagtctttccttcaagctcctcccatgaaccacaaactacaaaacatacttttgtgctctacaattattgaatcactctttgattaaattctttaatattttttgcgatgactgccacagatttttaataggagaaaataggaaccgggaaccccacagaccaaagctcttcccattcatgaacccgaccccaagtcaggattctcccctgaccaccctcccatggtccctgcacaatctgggagaggcgcggcgctgccggtgcagagccgcccagagagggctgcaggccagggcacagtcactgcgcagggaagagacaggacgcccgggggcccggctgtcggcgcagccgccatcttatggctgaaggggactgaggccgagctaggcaaggagaactcggagcgcagattgtggagatgactgcggggagtcctgagtcccgccacagccacttcccacaggtttcaaccagcccttcccctctctcgggatgtcggacggcactctcaccatttctaggcttccagagggtcctggagtcttagctgtggatctcccaatacctgcaggtcacagagccacagagtctgggcctctaggagcagaggacaaacagcagtgaagacgagaccggagctccggctgcagcaagagacaaaggccgcgccaaacccggaagccgccctgtccggtccagctgcgtgtctgagtgaactgtccccagctcagagtccctgattggataatgttaaaacccgccccttcaggccctgagggacggaagatgtgatcagatgctgggctgaatgaagtgtgacagcctatgctgcagccttttcaggcaaggcttcctccctgagctgagccaggcccacccgagagggtgtttgcctttaatcttgtgtataaggtcatatgcccttataaataatatgctatatggctattcacaaatgaaaagaatataataacccaattgttctaaaaaaaattttttttttgagattgagtttcactcttgttgcccaggctggagtgcaatggcgcgatcttggctcatcgcaacctccacctcgcgggttcaagcgattctcctgcctcagcctcccgcgtagctgagattacaggcatgcgccaccatgcccggctaatttttttgtatttttagtagagacggggtttctccatgttggtcaggctggtctcaaactccagacctcaggtgatcctcccgcctcggcctcccaaaatgctgggattacaggcatgagccactgcgcccggcccaactgttctaaaattttatattttgtgaccttcctgacttctggtcctttgagcaggcagcctgagattttaaaaaggaggcaattctctgaaataaaatgtgagccacaagttgggcgctgtacctcacgcctgtaatcccagtacttcgggaggccgaagagggtggatcatctgaggttcagagttcgagatcagtctggccaacatggtgaaaccccgtctctaaaacaatacaaaaaaattagctgggcatggtggcaggcgcctgtaatcccagctacttgggaggctggggcaggagaatcgcttgatcctgggcggtggaggttgcagtgagacgagatcacgccactgcactccagtatggacaacaagagtgaaactctgtctcaaaaaaaataaataaataaaataaaatcataaaatgtgagccacatgtaaattttaaattttctagtagccaaactttattttatatttttatttttttagacggagtctcacattgttgcctgggctggagtgcaatggcgcgatttctgctcactgcaacctctgcctcccgggttcaagcgattctcctgcctcagcctcccaagtagctgagataaaaggcgctggccaccatgcccggctaatttgtagccaaactttaaaaagagtttagctctatttttaaaaagaaacaaagaacaggtgaaattgattgtaacaatttaacccaatatatcgaaaatattgtcattttaatatgtgagaaatatgtaattattaatgaagtgtgtctatatatatggaactaaacctttgaaactaactcgtattttacctttctagcacatcgcagttcagaccaggcgcattccaggcagccagtagcaacacagggccaatagctgctacattgaagtgcagctctgacatcaggagggtgaacgacctgaacatcccttttctgccggaggtgaggagagagcctctccctaccaacatctctcttcggttctgagggtagaacagacagtggtcatagacagagcagagggcaggccgggcggagtggctcacgcctgtaatcccagcactttgggaggccgaggcgggcggatcacgaggtcaggagatcgagaccatcccggctaaaacggtgaaaccccgtctctactaaaaatacaaaaaattagccgggcgtagtggcgggcgcctgtagtcccagctacttgggaggctgaggcaggagaatggcgtgaacccgggaggcggagcttgcagtgagccgagatcccgccactgcactccagcctgggcgacagagcgagactccgtctcaaaaaaaaaaaaaaaaaaaaaaaaaaaaaaaaaaaaattagctgggctggtggcgcatgcctgtaatcccagctactcgggaggcagaagaatcgcttgaacctggaaggcagaggttgcagtgagccaagatcgggtcactgcactccagcctgggtggcagagcgagactccgcctcaacaaaaaaaaaaaaaaaaaaaaaaaaaagagcagagggcaacaggaataaaataaccataggtaaaccactgctgaccacctattgccctccttccttctagagatcagacagtgaacaaaggatgatggggccaaaggagaagagaaccctatgtctcttcaggcccgtccacactcttgacctccaatttttagatatgaaaaaaaaatagattaaaggcaagcttatcttgctatttggccttggccctaatggtcaggccgtggttgtctattttctcctgtggtatgagggactgtgtgggtataggcaccaatcacatgcatacaatgtctacgtgtatttctgcattactcaatattaccttacaagacatccaactctaaatcagaggaaaaaatagtacctttagagtgtccactgtgtgaaggtaagtagtactgaatctgtcattaaatcctggcatcctgtctgcactgggtgcatgtattagttagctattgcagcataacaaaccatccaaaacttattagctcataattgaaatggtcagccatttgggctgggctcagtggggccatttctctagtctcagctgagcatttttagacatgtatcatcagctgcttgttgactaagcagctgtgtttctgggagtgagcttctgcttctggagctgtcaacaggggcaactttttttctcctttccatggtatcttattctctgactggccaacgtgggtttttcccatggagatggcagcattctgaaataaaaacagaagcattcaagaccatttgagcctgggccccaaactagcccactgtcatgtccacaggtttctactgccctgagcaagtacgacccgccagatctagtgttcagaaaacagattctggatctcaatggaacaactgtaaaagcacctggcaatgggcaagaatacaggaggatgaaaaattgctaccattttggtaatcattattattctgccctttttaatgtatgtggtttatagaactcttccacagaaagaaatttgtccaaagactaacggctactaagtggctgagctgagattcagaataaattctgacttcaaagcccatgcaccaccatagataacaatattacagaatctgccctagtcctttgaaatcctggagagtggaacttctacaatagaggacagaggtcctttagattcatgcccatatggtactgtttattattgagaataattctctcaagaaattccagaagcagacggtggcttaaacctgtaatcatagtactttaagaggctgaaatggaagaatcacgtgagctcaggagttcaagtgcagctttggcaacatggtaaaatcttgtctccatgaaaaaaaaaagtttaaattagccaggcataatggtgcatgtctgtagtcccagctactcagttggctggggcaggaagattgctggagcctggaaggtcggggctgcagtgagccatgatgggttacaccattacacttcagcctgggtaatagagtgagaccctgtctcaaaataaataaataaatacaataaattacagaagcaatttgaaaggacataaaataatttggaaaaatagctaaggattgagtttatgaaatcaaagctggcagggcatcgtggcttatgcctgtaatcccagcacttggagatgccaaggtgggtggatcacctgaggtgaggagttcgagaccatcctggccaatcatggagaaaccccatctctactagaaatacaaaactatctggacatggtggtgctcacctgtacacccagctacttgggaggctgaggaaggagaatcatttgaacccaggaggcggaggttgccatgagtggagatcctgccattgaagtctaacatgggtggcaagagcaaagctccacctccaaaaaaaaaaaaaaatcaaagcccagcaacacattatatatttttcatcatagaaaaaatttgggctgggcacagtggctcacacctataatcccggcactttgggtggctgaggtgggtggatcacctgaggttaggagtttgagaccagcctggctaacatggtgaaagctcgtttctactaaaaatacaaaaaatcagccaggcttagtggcaagtgcctgtaactcagctactcgggaggctgaggcaggagaattacttgaacccgggaggctgaggttgcagtgaaccaagatcctactattgcactccagcttgggcaacaagagtgaaactccgtctcaaaaaaaaaaaaaaaaaaaaaagccgaacaacacattatatatttttcatcatagaaaaaattggaaaacttttaaaagaaaaaaaactttagagaaataaaattaaatttaacagagtttaagtgagcaatgaataatttgcaaatcaggcagactgtggatccacagtaggctcagtgagactccagcacagccacatggtagaaaaatatttatggacagacaaagcaaagtgacattcagataatgaaagtgaggtacagaaacagcaagattgattaaagccaggaatttgccttatttgaacatggtttgaacagttgatgtcctcttattggcaacaacacagcagttggtacaaaaatggattccagtctatttacatatccaattagatttccatttactatatattaaaaaacctattaaccaaaattaaacacaataggaaacagctttaggctataatttaataatttttcccttttggacatcttctcaatgttgagaaatagaccagaactttagataatgatatcactctgttaccataaaaaaaatgtacttatttaggctgggcgtggtagctcatgcctgtaatcccagcactttgggaggctgaggcaggcagatcacctgaggtcaggagtttgagaccagcctggccaacatggtgaaaccccatctctactgaaaatacaaaacttagctgggcatggtggtgagcacctctaatcccagctactcaggaggctgaggcaggagaatcccttgaacccaggaggcagaggttgcagtgagctgagatcgtgtcattgcactccagcgtgggtgataagagtgaaacttcatgtcaaaaacaacaacaacaaaaagtacttaattagtctcaaattccactttaaaatagcagaactgtggattttgaaaagtggaaacaaagacttcaggttattagttttttaaaggattacagtagaggggacctccttgtgttcaaatctgctgtttacaaaagaaaagcaaaacctggcctgtagattctaaagatcttcctatttccttaaattttcagtttgattgtgtcacatttaccatgagtgactccatttggtttggtttggtctgtttgggcctagtgcacaagcttggtccagaatgatggccttcaataattttgtttaaaacattttctcctttaggttaagttctcacataggtcaaagtgcgaccaaaactcaggggtcttattgccactctcagtttttattattttgggtttttgtccttataatgtcattcataggttatggtgtccccatggtcacatatgtctttgagttttttttaatgccagttaaagagaaaccattcgggctgggtgtggtggctcgtgcctgtaatcccagcactttgggaggctgaggtgggtgaatcacaaggtcaggagttcaagatcaagccactgcactccagtctgggtggcagaacaagactccatctcaaaaaaaaaaaaaaaaaaaaaaagagagagagagaccatttgacattctagagatgactacatgcaaacatttataacttttgagagaatacactgcaaaagggagacactattttgactatcacaacaccacacccagctaattttgtatttttagtaaagatggggtttctccatggtggtttgactggcgagagcacacctgaacaaaggagggaagcaatttttatcagaaaaataataccacaacttttaagtatgctttttggccagggttcccatgaataaccaactgaaattaaatagatcaaatagttaactagacaaatggcctactcatttcaaccaggcagactgttcattaatccccaacaaccgaatctctgtaatactcaatgtatttctccacatgcaactacaagtattagcaactgcacagatacttctctttttatccagtaagtaatctagagaaattctattatttagaacaaacttaggcggaaaatttaaagtctataaatgttataagtaaaatgtttatttagaaacagaatgcttgttccttggtaccgcaaggaaaaattaacattcagacaaaaaattgtctcagcaaggcaattttactttctgcagaaagggtgctccccagatggaacaatggcaagagcacacctgaacaaaggagggaaacaacttttatcccttatgcagcttgtccctgctactgcatcctgtctccattagatggagctggaccacacaatctaagctaacccaactggctaataatttaaaactttcctaaataggtaaaggcaagggagaacaaaggaaaggaggaagttgtttatgccagatagggaaggggcataggctgtgagctggaacgtgcctgtgaacatgtccagcacaaatatcttggttaaggtacaaggacatagaatgtactatgtgcctgtgagcatgtctagcagctacataggatagggcttaacaaagagttattagcacaaagcaaggaggcttgaaggaagttagtctttaaaagaaactattacttttaatacttacaaattattctttaacaagaagggaaactttgaagaggaaactttttactttctacaatagagtatccgtaattcttagactagaatctgctatagagccctattatgggggataaatttctaaccattgtctcatttactctaaaccacggaaaagaataacctaccaagtgtgctcattcagaagaacaatggcctcctggcaatgctctttatcctattctgaataagttctctttaacttgtaaagtaagttaagagcaatgaaccaatattctgtttctgatgttatgaagcaacaaatgtcccattaaaatgtctcacccacattggccctttatctttaatctatcaaggcataagtttgttcatagataaggttgactgcaaaatcctctacatataaaaataaaacccatgagtgcacacaagagatcccttttttctttttctttttctttttttttttttctttttgagacatagtttcactcttgttgcccaggctgaagtgcaatggcacgatctcagctcactgcaacctctgcctcctgggttcaagtaattctcctgcctcagcctcctgagtagctgggattacaggcacatgcccccacacccagctgattttgtatttttaatagagatggggtttctccatgttggtcaggctggtcttcaacttctgacctaaggtgatccacatgcctcagcctcccaaaatgctgggattacaggcatgagccactgtgccagccttttatttcttttgtttgcagaggcaaaaaaaccaaaaacaaaacaaaaaaaaaaaccaaaaacaaaaaaaaaaaaaacagacaaacaacaaacagtgaactaagagtgtcatgatagcagaaatgtcttgatttttgatttcgtgaaaatagcaatctacatcaaggatgacatctccttttgaggagaaacattcctagttagctttaccttaagatctccaatgggtataaaattgtaagagtttggaggtctgcttcagagttgtgagattatgaacccaaggttcaaggtcctgaagtcttactgcagtgtagatggcaagcagatttaatctctgggttgtagattataaagacttactgtcctcagtcagtagactgttaaaaggctttctttacctggtgaaaatatgcttcatcataatacattaaaatcttgctgcatttagtcatactagacttcagtaacagaagatacaagaggatctatttttaggtgcataggccttcacctatagtccagtgactatgagggtcaacacttttttttcactctaagtgtatatgattgtcatcaatctgcaattatgaaagcaatccagtcaatgtagttagcttttctcatactattgtatccattataccttatttaacattttgaaaacttgcctagtgaaataagtatctttatcattagagactttttcagaaatgtcccatgagagaaacatttccttatatccttttagctactggtataacagcagatttctaacatcagaaagcttttctactttaagaaaacatgtgttataagggacaattcaataaaatttctgtgtaaatgtttaaatggcccatgggatagcagaaaacatgcagttttgattgttttctcatgtttatatgtttgacaaaagaaaaatgtcataacctattttaataatttagaatagtcaccccccaacacacacaaacacacacacttattttttatttatgtttgtctgtttatttatttattttgagacggagtgttgctcattgcccaggctgaagtgcagtggcatgatctcagctcactgcaacctccaccacccaggttcaagcgattctcctgcctcagtctcctgagtagctgggttacaggctcccgcaaccacatccagctaattttttgtaatttcagtagagatggggtttcatcatgttggccatgctggtctcgaactcctgacctcaggtggtccacctacctttgccaagaccagctcggctggggagaccctaacccagtggcgctagaggaattaaagacacacacacagaaatatagaggtgtgaagtgggaaatcaggggtctcacagccttcagggctgagagacccaaagagagatttacccacatatttaataacagcaaaccagtcattagcattgtttctatagatattaaattaactaaaagtatcccttatgggaaatgaaggaatgggccaaattaaaggaacaggttgggctagttaactgcagcaggaacatgtccttaaggcacagattgctcatgctatcgtttgtggcttaagaatgcctttaagcagttttccaccctgggcaggccaggtgttccttgccctcattctcataaacccacaaccttccagcatgggctttagggccattatgaacatgttatagtgctgcagagattttgtttatggccagttttggggccagtatatggccagattttgggaggcctgctcccaacatgtcccccttctctgatttgcaaatcgataaaagcaaaggcagctttgtcacagtgagctacttcccgcaggagtcaggatccacatctgcagactatacaaagacaaacaacacagatgaaaagcacaatcatcattgaagtcacagagttttcaagtgtttttatccattttcagctcctttaagtactccagttcctggcattaaggccaggtgtgcctgggatgctttaaatatttgttcttttaattttaaatccttatgttaagctccttgagtgggccatatcatttgaatttgaggtgccactatactgccatggttccagataataggaactcttgctgtacttcttattatatctaccatctgaccattttgttcagaccagctgaacatagtgtgggcctggcatgcagactgagaggtggaattcaagctaaacatccccttaggggaccaattaataatgattccataggaatcattgtgcagcacctctgcctgctctgcaatgcaatcttcctaaactagtaggttcattttttctaactgggtccaatcctgtttacaaataggtttttgagggtggtatgcctcaattataggagcagatttattatggtaaatactgagatcagaaagcatgtgtaactgtgtcataaagtgattgcatccaggcattattgccagccaagactgataaatataaccaataagtataattgttctctgtgtcagcccttattgaaggaatactcacagcagtggtgataaccactatcatagctaccattaaattattcgttgtgactggttgtctcgcttttctcaggtttttttctgccatttatgacagcttcttgatttgtccccaggtgggtggctgtgttcaatgggtgttgctcatgacagttggggtcctcctcagcatcactctcaacatggctgcaaccggggggtcctcaggatcctcccagagtcttttccttggcatctggctcatgataaggtttcagatgtcttgatggtatccaaattggctgttgattcagtcctggagaaacacaagcataacctctactccaagttattattttacctatttcccaactttttgttattggatctctccaccaaatcagttgttctgcttctgtctttgcaactggtttctgtagatgctgttcagctgctgataacatctggcctttgggtaggctcaaaaaatttaaagttaataatgctagattcaattgcatctgtggggtttcatattctctgtctccctctttctgcttttgcaactgctgttttagggagagattcattctttccactatggcttgtccctgagaattgtatgggataccagtaatgtgtttaatattccacatagagaaaaatgtaggtagagcttggctagtatagtctggggcattatctgttttaatagaagctggaatgcccatcaccgcaaaacactgcaaaagatgatgtttaacacaggcagaagactctcctgtttggcatgtagcccagacaaagtgagaaaagatgtccacacatacatgtacataagctagtctcccaaacaagggaacatgtgtgacatccatttgccaaagagctataggttccaatcctcaaggattaactcctcctgtaaaagaagaggaatgtaccatttggcaagttgggcatcactggataatagttttagcttctttccaggtaatgctgtatctgcgtttgagaccagaggcattagcatgggttaaattgtgaaaatgtctagcattagatattgcattagcaactaggcaatcagctatctgattccctttagtcaaaggtcctggaagaggtgtatgagcgagccctaatgtgagtgatgtaaaaaggatgcagtctattcctaactgctgtttgcaattgggtaaataaaatcatcaggtgttaatctgtatgaaatcataactgagcattttcaattaactgtgtggaatgaaccacgtatgaagaatcagaaatcacattaataggcatatcaaaagcagtcaatacctcaattacagctacaagctctgcttttgagctgaagtatagggcatctggaaaactttacttttcgagccagaataaggagctttacaattactagacctatctgtaaaaacattctcagcaccttcaatttgtttaaatttagttatttcagggagaatccaattagttaatttcaaaaactgaaacagctccattttaggaaaatgattattgagaatacccacgaagtcagctaaatgagtttgccaagtaagactatttataaaagcttgctgtatttgtgcattcatgagagagacaataacttttccaggatcatatccatgtaatttaacaatccgagttctcccaattcctatcatagttgcaatttgatctaaataaggagttagagtccatgaattagtatgtggaagaaaaagccactctactaagtcctgtttttggataataacaccagtaggtgaatgctgagttgaaaaaattagcaaatctagagtcttctctggatctattctatttacttgagctttatggacttgcattttaattagttgtaacccttccttagcctgctttgttaattgccaagggctagtaagactaggatttcctctaaggatagaaaacagattacttgtggcataggtaggaatgcctagagcaagtcgtatccaattaatgtcccctagaaatttttgaaagtcatttaatgtttttagttgatccctatgtatggttaccttctatggcacaatggtagtgtcatttactaaggtccccaagtaggagtaaggagtagtagtctgaattttgtcaggggctataattaaaccagcatgaggagtcaaattttgcaagtgaccataatattggaataatatttctcaagtgggggcagcacaaactacattatccatatagtgaataatgtaacactgtgaaaaatattttatgagtaggttcaattgcttaccccacatacgtctggcaaattgtaggactgtttaacatgccctgtggcaacgctttccaatgataacacttagcaggctgcaggttgtttattgcaggaattgtaaaagcaaaccattcacagtcttgctcagctaaaggcatagtaaagaaacagtcttttaaatctaggactactaaaggccaagtttttggaattatagcaggagaaggcaatcctggctgtaatgctcccataggttgtataactgaattgatggttcttaagtcagttaacgttcttcatttacctgatttttttcctaattacaaaaactggagaattccaaggagaaaatgttggagctatgggcccattttctaattgttcagtaactaatttctctaaagcctccagtttctctttatttagcagccattgttctatccaaattggcttatctgttaaccattttaaaggtataggttctggaggcttaacaatggccaccatcaaaaatgatatcctaatctttggcagaaattttgtcttccacttgaagccgttctttcaaaccttgcaaaattttttccagtcccatgccagggacataccccatttcatgcattgtatgttgactttgagggctatataatttttctggaattagaatgtgtgctccccgttgttgtaataaatctcttccccataaaattataggtatagaagtaataattggttgaatagtcccaggttgtccatcgggcccttcacaatgcaaaatataactactttgatatacttcaggggctttaccaactccaactatgttaaattgagtgggttgaattggccacaaggatggccagtgctgtagagaaatgattgaaacatctgcttctgtatctatcaaacctttaaatttctttccctgaatagttatttcacaggtaggacatttatcagtaatttgatttacccaatacgctgctttgccttgtttatttgtgcttccaaatcctctttttcatttagtttcactttttcccattcccacatatggcacaatcaggagctgtgctatacactctcctggctctgctttccagggaacagaagtagatacaacaatttgaatttccccattgtaatctgaatcaatgactcctgtatgtatttgtatgccttttaaacttaaactagaccttcctaaaagtaatcctattgtccccactggcaaggttccacagactgctgttgggaccttttgcgggggttgcccaggcagaaggctcacaggtttcatgcagcataaatctactgtggcagtactggctatggcaggggacagacattgtacgggggtgacggaatggcctgagctggaaatacccccttttagaacggggcctgggaagggcccctcatggcgtttcctgaaattgggttcccttctttatcaaacttagagtgacattgattagcccaatgttttccttttttacatttttgacatatttcaggatcagcaattttcttttttcccctatctggcggcctgacttctacattcctttttagtatgaccatgcttcccacagttaaaacaagctccagaaaatggatttatttcctttatccactctcagtcctgccattgcctgttctaccagagtagctttatgcagattacctctaataccatcactggccttgatataatcaactaaatgtgctttccctctgataggtcacagagcagcctggtaatcgggattagcattgtcaaaagctaataagtgcaacactatatcctgagtagccaaatctgcaatcatctttttaagagactcctgtaaccgagctataaaatcaatgtatggttttcttggtccctgttttatagcactaaaggaagggtatttttccccacttgaagtgatttttttcccaagctttaatgcacactcctctaagctgttctatggcatcatcctgcatgaccagttgtgcatctaaaccagcccagccgccaacccccaaaagttggtctgagttatatcaatttgaggatgggcctggccattgttagcagcctgaatggaagcttcatctgcccaccaagttttcaattgtaagaactgagcaggagttagacaaactcaagtaagagtgtcccagtcagtaggaatcatctgactggaaacagcaacattctttacagttgttacattacaaaacagtcccattacaaaaggagaacctggtccatactgattaatagcttctttaaattatttgagtaatttaaaaggaaaaggctcaaatgtagccgtaatatttccctgttgatctggggggtgtattctaacagggaactgccaagcctctaaatcaacctctcgtctagcttgctgaattcctgcctgaatagaactaagagtggtcactcgaggcgctgtttgaacagtcactggggcaactacttttcatccagtgtcctctggaaaagaaagatctggagggtctttttcttcaaaataataaggagggtgtgcagaagggtagggatgaacctctccttcctttgccgctttctctttagctggtaaataaacatgctctgtaacctcttctgttactttgctgtactctcgttcctcctcattagtgtgaaaaagttccaaagtgaaacgaaccagaccccacacctgtcctatttttaccctgatgcttctgagctccccctcttactcaccacggggattgctttaagagtactcaggtgtcctccagttagttctccattccaaagattgctccagtgaccctttgacctggattcgagccccaatgatggatgccacttgccgagaccagctgggtgggggagaccctaagccagtggtgctagaggaattaaagacacatgcacagaaatacagaggtatgaagtgggaaatcaggggtctcacagcctgctgagagccccaaacagagatttaccacatatttattaacagcaaaccagtcattagcattgtttctatagatattaaattaactaaaaatatcccttatggaaaatgaagggatgggccaaattaaaggaacaggttgggctagttaactgcagcaggagcatatccttaaggcatagatcactcatgctattgtttgtggcttaagaatgcctttaagcagttttccaccctgggtgggccaggtgttccttgccctcattccggcaaacccacaaccttccagtgtgggcgttagggccattatgaacatgttattttgctgcagagattttggttatggccagttttggggccagcatatggccagattttggggggcctgctcccaacatgccttggcctcccaaagtgctgggattacaggcatgagccactgcacccggccctatatttatttatttatgttttctttttgagatggagtttcactcttgtcacccaggctggagtgcaatggtgtgatctcggctcactgcaacttccgcctcccaggttcaagtgattctcctccttcagcatcctgagtagctgggattataggtgcccaccaccatgcctgactaacttttgtatttttagtagacatgtggtttcaccatgtttgccaggctggtctcaaactcctaacctcaggtgatctgcccaccttggccttgcaaagtgctgggattacaggcgtgagccaccatgcccagcctaatttatatttaatttagattattttatctcatctgtgatatgtaatggaatacagcactttcaataacggaagctataagaactcaggaataaacaaggggctgttggctttctaggttttccatgagtccacacttaacataaaatttatttcctcttaaatactaggctttgtttctccaatttagttgcattgcactgataactgtcataggtaattgacttaaaccacagggtttattcaaatgacatatctgaaaaattcagtactagctgatttaccataaatatgagacagagtattttcaaaatatttaattaatatttattttgcctgggttataaattttatgagtcagtctcttcattagaactcacataatccttacccagtccaaacaatatgatcctcaaattatcagaaacctgtactcaatttttctgggccatttttatcttttcataaaccttcttaaagacacaatactctagaattttgcatgcttttgaagtttttagaaactatatcagaattaacctgttaactgtagaaatgacttgaaatggttataaaggaacaaatgaaaagaagttcattatatctgtggcctacaataatttatcataatagccataattatgactaatagcatatactcaggtatattagatttttagaaattgtaggccaggtgtggtggctcatgcctctaatcccagcactttgggaggtcaaggttggtggatcatgaggtcaggagatcaagaccatcctggccaacatggtgaaaccacatctctaccaaaaatacaaaaaaaaaataggtaggcatggtagcatgcacctgtagtcctagctacttgggaggctgaggcaggggaatcgcctgaacccaggatacagaggttacagtgagccaagattgcaccatttcactccagcctgggtgacagagcaagacaaaaaaagaaagaaagaaagagagaaagggggtagggagggagggagggaggatgtatacaattttggaatacatttttttgtttgtttgtttgttttgttttgtttttagagacagagtttggttctgtcacccagtctagagtgcagtggcgtaatctcggctcactgaaagctccacctcccaggttcacgccattctcctgcctcagcctcccaagtagctgggactacaggtgcctgccaccgcacccagctaatattttgtatttttagtagagatggggtttcaccatgttagccaggatgttctcaatctcctgacctcgtgatccacctgccttggcctcccaaagtgctgggattacagatgtgagccaccgcgcctggccttttggtttttatttttgagacggagttttgctctgtcaccaggctggagtgcagtggctcactgcaacctccacctcctgggttccaatgattcttctgcctcagcctcccgagtagcagggactgcaggcatgcatcaacatactcagctaattttttgtattttagtagagacagggtttcaccatattggccagaatggtctctatctcctgacctcatgatccacctgcctcagcctcccaaagtactgggattacaggcttgagccaccacacccagcctttggactaaatattaataacatttattaaaataaaagtttgatcaaacatttttaatttaacaatgttttccatttaatttaccatatcagataattctgttcttcactctttgggatgctgcgttggccctctgtaacatccaaaactttgggattaaaaaaaagacaattttttagctgaaatgtgattttgtgaagcttgtcaaatatgtcaaagggttgccaggcatggtgactcatgcctgtaatcccagcagtttgggaggctgaggtgggtggatcatgatgtcaggagttcaagaccagcctggccaagatggtgaaaccccatctctactaaaaatacaaaacttagccaggcgtggtgacaggcacctgtaatcccagctactcaggaggctgaggcaggggaattgcttgaatccaggaggcataggttgcagcgacctgagatcatgccactgcactccagcctgggtgacagagcgagactcagtctcaaaaaaaaaaaaaaaaaaaagtcaaagggttaaaatgctttaccaaaataggatcacatggcaccataaaataatagtcattcacttaaaaatgtgataataaaaggattttaaaaaacaaaaccattaccacttgatataagagattgagttttccaattaaaacacctgagaaagacagcatgaaaaaattctatctctactttctttgttttcaaatttgttcaaaaagtgaacaaaaatattttactttgtcatattattaatacataagacttttgttccagagaaaatcaatttctagttttgtattagtgtattatctatactaaagctcattttaataaaactttataaataaatccaccaaatttgtcacttttgaccactctagatttccatacatgttttacaatcttttatagttaattctttaactttttatattctgtctctattctttttattttttcatttttcaacaatctctaatttcaaacttatcgggggaaccagcccccaatatttccatgtatgttcttttctattttccttaagtgtcagccagtctgagaaataaacagaaagagtacaaggagagaaattttacagctgagcctctgggggtgtcatgacatattggtaggactgtgatggcgacctcgagctgcaaaaccagcaagtttttattagggattttaaaaggggagagggtgtacaaacagggagtaggtcataaggatcacatacttcaaagggcaataaagatcacaaggcaaggcaaattagaattcctgatgaaggtctatgccccaccgtgcacacattgtcttgataaacatcttaacaggaaacagggttcaagagcagagaaccggtctaactagaatttagcaggctggaatttcccaatcctagtaagcctgagggtactgcaggagaacggggcatatttccgtccttatctcaaccacataagacagacactcccagactggccttctatagacctacccccaggaaggcattccttccccagggttatcaattattaatattccttgctgggaaaataattcagtgatacttctcctattcacacatctgtctataggctctctgcaagaagaaaaatatgactgtattctgcccaaccccacaggcagtcagaccttatgtttatcttcccttgttccctgaaaattgctgttattctgttctttttcagggtgcactgatttcatattgttcaaacacacatattttacaatcaatttgtacaatagtggtcctgaggtgacgtacattctcagcttatgaagataacaggattaagagattaaagtaaagacaggcataagaaattataagagcattattagggaagtgataaatgtccatgaaatcttcagaatttatgttcagagattgcagtaaagacaggcataagaaattataaaaatattaattttgggaactgacaaatgtccatgaaatcttaacaatttatgttcttctgcctcagttccagctggtccctctgttcagggtctctgacttcccacaacacaaactagaggaaactttcccaatttttttatcaaaaagtagtttttacttgtctatacattctatgcagagttgtttttcttacatctagtagttttaattacatacgttaattacattaactctgaacaaccaaatttttagtgaaatctcaaggaagtaattttgaacagtttcatatcagtatttgtgacaaaaacaattttatattttttaaaaaagacgattttctcaaattttctgttaactaacagatctaaatctatttagttttttaaacatcatataaaaataagattccagtaaatcatggtgtctcacacttgtaatcccagcactgtgggaggtcaagacatgaagactgtttaagcccagaagtttgagaccaacctgggcaacatagtgaaacccacgtctacaaaagatacaaaaattagttgggcatagagccctccacctggagtacaagctattcaggaggctaaggtaggaggattgcctgagcctaggagtttgaggctacagtgaaccatgatggagccactacactccctccaaagtcacagagtgagacactttcttaaacaaaaaaatgctaatgtatataaacttaaacttatgggtttctttgctcttattattttaatagttattggggtacaggtggtgtttgctggtgatttctgaaattttggtgcactcatcacctgagcagtgtacattgtattcaatgtgtagtcttttattcctcaccctctcccatccttctcctcaagtctctagagtccattatataattcatatgtctttacagcctcatagcttagctctcacttataagtgagaacatacaatgtttggttttctattcctgagttacttcacttggaataatggtttccaactccatccatgttgctgcaaatgccattatgttgtttctttctatggctgagtagtattatgtataccacattttcattgtttactcattggttgatgggcatttaggctggttccatatctttgcaattgccaattgtgctgctataaatatgtgtgttataagtttcattttgttgttgttgtttttttttgagatacagttttgctcttgttgctcaggctggagtgcaatggcgcgatcttggtttactgcaacctccgcctcaccagctcaagcaattctcctgcctcagcctcccgagtacctaggattacaggcatgtgccaccatgcctggctaattttttatttttaatagagatagggtttctccatgttggtcaggctggtctctaactcccaacctcaggagacccacccaccttggcctcccaaagtgctgtggttacaggcgtgagccaccgtgccaggcccacaagtttcatttttatgtgacttctttttctgtgtatagatactcagtagtgggactgctgaataaaatattagttctatgtttagttcttttaagaatctccatactgtttttttatagtggttgcactggtttacattcacatcaaaagtgtaaaagtggttttttttttaaccacatccatgccaatgtctatttttttgttttgttttaattatggccattcttggcagggcacaatggctcatgcttgtaatcccagcactttgggaggctgaggtaggtggatcaattgaggtcaggagttcaagaccagcctggccaacatggtgaaactccatctctaaaaatatatgaaaattagccaggtgtggtggtaggtgcctgtaatcccagctattcgggaggctgaggcatgagaattgcttgaacctgggaggcggagattgcagtgagccgagatcgtactgcactccagcctgagcaatagagcaagactcaagtcccaaaaaaaaaaagaaagaaagaaagaaagaaaaggctgggcacggtggctcacacctgtaatctcagcactttggaaggccgaggcaggtggatcacgaggtcaggagatcaagaccatcctggctaacacggtgaaaccctgtctctactaaaaataaaaaaacaaaaaaaattagccaggcgttgtggtgggcacctgtagtcccagctactcgggaggctgaggcaggagaatagcatgaacccgggagacagagcttgcaatgaaccgagatcgcgccactgcactccagcctgggtgacagagcgagactccatctcaaaaaataaaaaattatggccattcttttttttgacatgaggtttcactcttgttgccctggagtgcaatggcataatctggctactcttacaggagtaaggtggtattgcatcgtgcttttgatttacattacaaatcaaagtcccatttatttatcttcacttaattgtatttgcttttgggttcttggtcatgaagtctttgcctaagccaatgtctacaaaagtttttctgatgttatcttctagaattgttagttacaggtcttagatttaagtctttaattcatcttgagttgatttttctatgagagatgaagatccagttttattcttctacatgtaccttgccaattatcccagcattatttgttgaatagggcattcatttcccactttgtgcttttgtttactttgtcaaagatcagctggctgttagtatttggctttatttctgggtttgttattctgttccattgctctatgtgcctatttttataacagtaccatgatgttttggtagctacagccttgtagtacagttttaagttgggtattgtgatgcttctagatttttgtttgtttgtttgttttgcttagttttactttggctatgcgtgcttttctttggttccataagaattttataattgttttttcaagttctgtgaagaatgatgttattctgatgggaattgccttgaatgtgtagattgcttttggtaggttggtcatttttaaagtatttactctacccatccatgaaagtcagatgtttttccatttgtttgtgtcatctgtgatttctttcagtagtgttttgtagattttcttttagagacttttcacttcctcggttaggtatatttatttatttattattattattattttttttttgagatggagtttcgctctcgttgcctaggctggagtgcaatggcatgatctcggatcaccccgatctccacctcccaggttcaagcgactctcctgcctcagcctcccaagtagctgagattacaggcatgtgccaccatgcccagctaattttgtatttttaaaagagacgaggtttctccatcttggtcaggctggtcttgaactcccgacctcagtttatctgcctgcctaggcctcccaaagtgctgggattacaggcatgagccaccatgccctgccacggttaggtatatttctgattattttattttattttttgcagctgttgttaaagactttgtgttcttaatttgattctcagcttggtggctgttggtgtatagcagtgctaccaatttgtgtacattgactttgtatcctgaaacgttactgtatttatttgtcacatctaaaagcttttcgggtgagtctttagggttttctaggtatatgatcttatcatcagtgaacaataacatcttcacttcctctttaccaatttggatgtcctttatttctttgtctcatctgaatgttctggctaagacatcctgtactatgttggatagaagtggtgagagtggccatccttttcttgtttcagttctcagggggaatgctttcagcttttccttgttcagtatattgctggctgtgggtttgtcatagatgacttttattcccttaaggtatgtctcctctatgctgattttgctgagggttttaatcattaagggatgctgaattttgtcaaaagctttttctgtatctattgagatggtcatacaatttttgtttttaattcagtttatgtggtgtatcacatttattgacttatgtacattaaaccattcatccatctctggtaggagatgcattgtatcattgtgtattatctttttaatatgctattgtattttgttggctagtattttgttaagaatttttacatctatgatcatcaggaatattggtgtgtagttttcttttcttgttatgttttttcctggttttggtattagggtgatattggcttcatggaatgatttagaaataattctttcctactctatttttttgaatagtttaagtagaattggtaccaattcttgtttaaatggcaggtaaaattcagctgtgactccatttggtcccagagtattttttgttggcaattatttcaatcttgctacttgttattgatctgctcagagtttctatttcttcctggtttactccaggagaattgtatatttccagaaatgtattcacctcttctaggttttctagtttgtgcatttcataatattcatagtagccttaaataatgttctgtgtttccgtgggattgcttgtaatatatcctgttttgtttcaaattgagtttatttgaatcttctctcctttccttggttaatctcgctaatggcctatcaatttcatttatattatcaaagaatgaacttttttcatttatcttttgaaatttttgtttcaatttcatttagttctgcactgatctttgtgatttatttttctgctgggtttgggtttagtttgtttttgtttctctagattctagaggtatgagcttagatttttaaatttgggctctttcagactttttgatataggcattgttatgaacattccctttagcactgcttttgctgtattccagaagttttgataagttttgtcactgttatctttcagctcaaagagcttttatatttccgtcttgattttattgttgagcaaatgattattcaggaaaagattatttaatttccatgtatttgtatagttttgagggttcctttcatagttgatttccagttttattccactgtgatctgagcgagtacttgatataatttcaattttcctaaatttattgagacttcttttgtggcctatcacatggtctatcttggataatgtttcatgtgctgataaaaaatacacattctgcagttgttgggtagaatgttctgtaaatatgtgttaagtccatttgttctagggtatattttaagtttattgtttctttgttgactttctgtcttgattatctgtctactgctgtcagtggagtattgaagtcccctactataaatgtgttgctgtctatctcattgcatttttttctttcttttttttttttttttttttgagatggagtctcactcttgttgcccaggctggagtgcaatgacacgatctcagctcactacaacctctgcctcccaggttcaagcaattctcctgcctcggcctcctgagcagctcggatttcaggcacccgccacaacccccagctaattttttttttttttttttttttgtacttgagatggagtcttgctcttgttgcccaggctggagtgccatggcacgatcttggcccactgtaacctccgcctcctgggttcaagtgattctcctgcctcagtctcctgagtagctgggattacaggcacccaccaccacgcctggctaattttttgtattttagtagagacggggtttcaccatgttggccaggctggtcttgaactcctgacctcaagtgatccacctgcctcggcctcccaaagtgttgggattataggcgtgagccaccacacccagccaactaattttagtatttttactagagacggggtttcaccatgttggccaggctggtctccaactcctgacatcagatcatccacccgcctcggcatcccaaagtgctgggattacagtcgtgagccacctctcccggcttaaagttttttttctttaaaagttttcaaacatttgctatgatgaaaaataaataatgtgctgttcagctttgatttttttttttttttttttttgagagagagtctcgctctgttgccaggctggagttcagtggcacgatctcggctcactgcaacctctgcctcctgggttcaagcgattctcctgcctcagcctcctaagtagctgggactacaggcgcccgccaccacgcccagctaatttttgtatttttagtagagatgggtttcaccaggttggccaggatgatctcaatctcttgacctcgtgatccgcccacctcggcctcccaaagtgctgcgattacaggcatgagccaccacgcccggcctcagctttgatcttctaaactcatccttcatcttttccaaaaattattccatgtcttttcaaaatgcttctccagttttgtttttttttttcttgaaacagggtctcactctatcacccagttttgcttgcaatggtgtaaccaatcatggctcactgcagcctggaccttccaggctcaagcaatcctcctgcctctgccacctaactagctgcagctacaggcatgcaccaccatggctggctaatttcttcatttttgtcatgaaaacaaactcttattatgttactcaggttgcactggaactcctgcgctcacataattctcccatctcagcctcccaaagtgctaaaaatataggtgtgagccactgtgttcttctgcaaatttttttttttttttaatacagaggctggctctgttgcccaggctggagtgcagtggcacgatctcagctcactgcaacctctgcctccccagttcaagtaattctcctgtctcagcctcctgagtagctgggattgcaggtgcacaccaccacgtctggctaatgtttgtatttttagtagagacagggtttcaccatgttggtcaggctgctctggaactcctgaccccatgatccacccaccttggcctcccaaagtgcaaggattacaggcatgagccactgcacgtggcctcttctgcaatttcttaagaggattatttccagtgataaacagtagtatatgaacacaaacctaaaaggaatctgacttattctgtagaagtgtcactctccaggatttcaagggtctagggcagggcagctactttagtagtatgatctatggaggtgcatgggctttggcgtcagataaagttgatcctgagtcttattccagtcacttagtactcgtgggtctttggacatgtttgttgatgtggagaagctctatataccacatatgcaaaaaaggtagactgatactgattgcaaaatggcagcaatttttctgccctcttgtatctatgcccattgtcaggtgcttttacagctgtttccatcaagatccagaatctgtcttctaaaccctagatctggctggccttatttgctcagggcagtagaaacttgtgaacatgacagtgggctagtttggggcccaggctcaaatggtcttgaatacttctgttttttgttcagaatgctgcaatctccatgaataaagcccatgttagcaagcttaaaaataagataccatgaggaggagaagcaaggtgcccctgttgagccccagaagcagaagatcacccccagaagtacagctggctagtcaacaagcagctgatgataccagtctgaaagagctcagctgataccagaagaacggccccactcacccagcctaaatggctgatcatcttaattataaactagtaagttttggatgatttgttatgctgcaatagctaactaatacatgcaccagtgcagataggatgccaggattcagtgacaggttgattacttgttgccttctaacagtgggcaccctctaggtactgatttcttcccctaatttaaagttggatgtcttgaaagagaatgttgggtaatgcagaaatactgggagacatgtatgcatgtgattggtgtttatattcgcacagtccccacaccacaggagaaaacagataaccacagcctcgcaattagggtcaaggccaaatagcaaaataagtttgcctttaatctattttctctgtatctaaacactggagtccaagaatgtgggcagaactgaagacacagagtttttttctcctaagctccatcatcctatgttcacagcctaatctctaaaagaaaggtgggcaacaggtggtaagcagtggtttacctgtggttattttatttctgctgccctcagctctttctatggccactatctgttccaacctcagaactgaagatagatgttagtagggagaggcccttccttcccctctggcccttcacaccattgacatcagagctgccatgtgtggctcctgggtgcctggaatgtgcttggtctgaaccgcgatatgctagaaaggtaaaacacagagttattttcaaaaatttagttgcaaatatttatatacttcattaataattacatattcctcacacattaaaatgatattttgtatatattaggttaattacattgttacaatcaattcaacctgttccttgttattgttgttgttgttgttgctgttgttgcagtctgtcactaggctggagtgcagtggcgcaatctcggctcactgcaacctctgcctcccgggttcaagcgattctcctgcctcagcctccccagtagctgggattacaggcatgcgccaccacgcctggctaatttttatatttttttcagtagagacagggtttagccatattgccaggagggtctcaatcacttgatctcgtgatccaccagcctcggcctcccaaagtgctgggattacaggcgtgagccactgcgcgtggcctcttgtttctttatatttttcaccccccaaaacggagtctcgctctgtccgcccaggctggagtgcagtggcgcgatctctgctcactgcaacctcctccgcctcccgggttcaagcaattctcctgcctcagcctcctgcgtagctgggattacagatgtccaccaccacgcccggctaatttttgtatttttagtagagacgtggtttcaccatgttagccaggctggtctcaaactcctgacctcttgatctgcccgccttgtactcctaaagtcctaggattacaggcgtgagccaccatgcctggccccttgtttctttttaattttctagtttggctaccagaaaattcaaaattcacgtggctcacattttatttcagaggattacctcctttttaaaatctcaggctgcctgctcaaaggaccgtaagccaggaaagtaaaaaaaccctgaaattttaaaacatttgttattatatccttttcatttatgtatagccatatgatatagtatttacaaatgcatatgaccttatacgcaaggttgaatgcaaataccctttggggtgggcctatctcagctcaaggaggaagccctgcctgaaaaggctgcagcctaggcggtcactctttcttcattcagcccagcatctaattacatcttctgtcagtcagggcctgagagggtggggttttaaacgttatccaatcagcgacgctgggctgggaactgtccaatcaggcacgcagcttgagcggagaggacggcttccgggatgtggcgggatttgtccgcttctttgtctttggctgccgctggaactccgggtctcgtcttcactgctctgtgtcctctgctcctagaggcccagcctctggtcctgtgacctgcaggtattgggaatccacagctaagacgccgggacaccctggaagcctagaaatggtgagagtgcggggtccaacatcccgagagaggggaagggctggttggaaccggtgggaagtggctgtggcgagactcaggcctccccgcagtcagctctacaatctgcgccccgagttctccttgcccagctcggcctcagtcgccttcagccataagatggcggttgcgccgacagcccggcccccgggcgtcctgtctcttccctgcatagtgactgtgcccttgcctggagccctctctggggaatctctgcacccgcagcgccgcttctctaccggattgtgcagggaccgtgggagggtcgtcaggggagaatcctgacttggggtgcgggttcatgaatgggaagaggtttgttccgtggggttcccagttcctattatctcctattaaaagttaatgggagtcactgcaaaaatattaaaagaatttaatcaaagagtggttctaggctgggcgcggtggctcacgcctgtaatcccagcactttggaaggccgaggtgggcggatcagaggtcaggagatcaagaccatcctggctaacacggtgaaaccccgtctctactaaaaatacaaaaaatgagccgggcgtggtggcgggcgcctgtagtcccagctactcaggaggctgaggcaggagaatggcgtgaacccaggaggcagagcttgcagtgagccgagatcgtgccactgcactccagcctgggcgacagagcgagactcttgtctcaaaaaaaaaattaacttattaaataatttaatcaaaaagtggttctagaattgtagagcaccaagctgtggtttttagtttgtggtctatgggagaggcttgaaagaaagtcttttgtaaaatgcatgatgaagaaaaccaaatttagtaattggttaggtacagttacgtggttttttaatttgtacattaaaggtgaaaatttcctggttatgtaatcggagctcaattggcagtttatagtaggtgaagcctcaattttgtttctctgaatttagtaattaaaaataatgcgcctgagttagattttttaaattgaagtaggaacccagggactagagaaacctcagtctaattgcctgccacttaattattttcacactccacagggaactgattttctgctgcatttttcacctgggtcccaatcagggtcttaagtctaacccccatccctcattactccaacctcattcttgcttgcagtaagatactaaatttccaatttcttctggggttcccaaatgccagcttttcctccctaattcacattatcacgtatttgtgtttttttgtttgttttgttttgtttttgagatggagtctcgctctgtctcccaggctggagtgcaatggcgcgatctcggctcacctcaacctccgcctcccggttttaaacaattctcccacttcagcctccttagtagctgggattacaggtgcgcgccatcatacctggctaatttttgtgtttttgtaaagacgggggtttcaccatgctggccaggctggtctcgaactcctgacctcaggtgatccgcccgcatcagcttgccaaagtgctggaattacaggcgtgagccaccgggcctggccacttattttgtagtgtacttttttataccgtattttaattaattattttttggcaaggcattaaatggtgcttttttcttttcttttttttttgagacggagtttcactcttgttgcaaaggcacattctcggctcaccacaacctccgcctccgggttcacgaggttctcatgcctcagcctcccaagtagctgggtttacaggcatgcaccaccacgcccagctgattttgtatttttagaagagatagggtttctccatgttggtcaggctggtcatgaactcccgacctcaggtgatccgcccgccttggcctcccgaagtgctgggattacaggcgtgagccactgcgccctgcataaatggtgttttgggggtttttttgtttgttttttgttttgagacggagttttgctcttgttgcccaggctggagtacagtggcatggtctcggctcaccgcaacttctgcctcccgggttcaggcgattctcctgcctcagcctccgagtagctgggattacaggcatgtgccagccaccacgcccggctaattttttatttttagtagagacagggtttctctatgttggtcaggctggtctcgaactcccgacctcaggtgatccgcccgcctcggcctcccaaagtgtggggattacaggcgtgagccaccacacccagaccaatggtacttttaagaaggtttgttatctgtttgtaaatattttccatgaaaagaaagcaaataataatcccctgacactgtgttgcaaaaaatctctgtgtgtcttttccttttatctttctaggcacagagatgttatcggaatttttttgggtcagagttctgctttggaaaatttatggggtgatgtgtcctcagccaccgtttagttttttcccggtcctgggtttcagtattatctggggataaaccgagatatctgccatggttatgtcagctagagtgtctagtggatatcagcttctggtttattttctcccataggacgacctgaggtatggagtgtatcctgtcaagggggcaagtggataccctggggctgagaggaatcttctggagtactcttattttgaaaaggtaaccccttgatatgttaaaattgtctttgggaccagcttgaaaaacatgctctactaaaaatacaaaaaacttagccaagcatggtggtgcatgcctgaatttccagctactcggggttgctgaggcaggacaatcacttgatcccgggaggcagaggttgtggtgagccgagatcctgccattgcactctagcctgggcaacaagagtgaaactccatctaataataataataatgataataataataataataataataataataataatgaataaattgtcttctaccaaccctgcttccatttcatggagacaaattgcttgtcagccaatcagatgctggtaatgaggaacaaacacagtaataacttctgccccctggattctgtaagggagcagaagaatagtgaaataaatatagtaaaagaaaaagagtaaaaaacagtgaaaaatatgtgaccaaaaaaatagtatcccgaaagacaaacaacaaaaacaacaacaaactgactccagtgagatggtgtaagaacttgcaaagtaaaatgcacctagggcagtcaccgaaaaatagtgcagtgtctcctgaatgggtggttcttgagcacataagtgagcaggagtgggtggaaggatctctcaagtgattgaatggcctgacttgaaacgtgagtcagacacatctgttatttaaccagcactgccattcctggatttgtcaccttgaagagatttgttcacttattttcacctgttttttagctgtaaggttacattatattagtagggcttgaaaggtagaaaaatatttacaaagggcataaaagacgtgggattcaaaaaaattaatcatatatttcatttgttaaaaattttcacttacctttttctttcccagagtgagtttacaagttttctcaggtgtagcttttaatggctgggtgatttcaaacagaatttcaagcttagctttcagaatgctaccaagaaaaagaagaggaaaaatgtctattccatttttgccgtagaaaatgaatacgtttccacaagaaaatgtggtagataattggtgagttacatagattcatgaaaacatcagttcctttttttggcagggtaaatttttgacagcgaatatctctgttcaaattctgttatcttgatttctgagttttatgctaaattttatgagatgaaacttggtattgcctggaagtgtttccatatgactaaatgtttgctgcatgatttttaatggaattaatagaataatacatttattttctgatagaaatacttttgcttttcttattaaggtataaaatgtaagcaccttaaaattttcttcccttataggaatactgtgtttgagtaatttttttggatttttcaaacaacttagtttcaaaaaccaagtgagcaactctaacatggaaattaaagcttgagcccagtgactcagagctagggcttatattgagactgtaaaagtaggttattaaaggtccagttagttttttctggagtgcctctcctgcagatgttctagcctgctcactccagtcatggaagaagcctttctgatgagagaagctagagtcctggaaagctacaggcagatgagttaaggttaagacaaaaggggactgggagggtcttactgaccgtgtagttgttttaaggcagtttctagactttgtaatatgttataaagttaatttctgttaaaaaatttgaattctagacccaggcacggtggttcatgcctgtaatccctgcactttgggaggccaaggtgggcggatcacctgaggtcaggagtttgagaccagcctgaccaatatagtgaaaccccatctctactaaaaatacaaaaattaactgggcgtggtgatgggtgcctataatccagctattctggaggctgagacaggagaaatggttgaacccaggagtcggaggttgcagtgagccgataacggtcccactgcactccagactgggtgacagtgagactccatttaaaaaaaaaaaaaaaaaattgaattctagagcccggcatggtggctcatgtctgtaatcccagcactttgtgaggctgaggcgggcataccacctgatgtcaggagttcgagaccagcctgaccaatatggtgaaaccccgtctctactaaaaatacaaaaataatccaggcgtagagatgtgcacctgtagccccagtgacttaggagcctgagacaggagaaatgtttgaacccgggagatggaggttgcagtgagccgagatcatgccactgcactctagtctgggcaatagagcgagaatccgtctcaaaaaaaaaaaaagaattcaaaaagagcattgcaacaggaggaataccaattataaaaattttaaggaatgcaattttaggtagacaagggctttttttcatagagtggagcctacaagattagaaagaatggaggagaatggcaaacggggggttaaaaaatcagatttcagatcagagaatgttttatcctgaagtcagcatgttcttaggagggatatagaatgaaattgtataatggctcagattgagggtagctcaaagttcagtagcctgtgaaaaattttatttagaccactgaagacaaatacagctgactcttttaataagaaaaagaagaaaaggtgccaagtttttaccaaaaaagggtcccaatccaaaccccaagagagggtccttggatttcattctagaaaagaattctgggtaagttcattgaataaaatgaaaggaagtttattaagaaagtaaagaaataagagaattgcttactccataggcagagcagtccggaggcctactggttgcccattttatggttctttcttttttttttttttttttttttgagagggagtcttgctctgttgtgaggctggagtgcagtggcatgatctcgactcatggcaacttctgccttctgggttcaagtgattctcctgcctcagcctcctgagtgactgggactacaggcatccaccaccatacccagctaatttttttttttttttttttttttttttagtagagacagggtttcaccgtgatggccaggatggtctccatctcttgacctcatgatccacccaccttggcctcccaaagtgctgggattacaggcatgagccactgcacccagccagttatttcttgattatatgctaaacaaggggtggattatttattcccattgtagaccatatagggtaacttcctgatgtttccatggcatttgtaaactgtcatggcactggtgggagtgtagcagtgaggatgagcagaggtcacactcattgccatcttggttttgttgggttttatcctgctccttactgcaagctgttttgccagccaggtctttatgacctgtatcctgtgctgacttcctatcttatcctgtgacttagaatgcctaaccatctgggaattcagcccagtaggtttcagccctattttacccaccccctattcaaaatggatttgccctggttcaatatgcctgacatttcctccctcttttgtacaaaaaaaccccttaatcataagggttacagaggaatgaaaattcatcttctgtaactacttcatgctgtataggggcgatgatattcttgcttaactattagagtcttttgtatttgaggtagagaggagctcaatcggaactcatcagtatgtgagggccattcataactgttgagtttcaaaaaaggggttatctcaaagattagtaagtgtttaatttaagaaaacatctaggctgggcgtggtagctcatgcctgtaatccaagcactctgagaagcctaggcgggtggatcgcttgaggtcaggagttcaagaccagcctgaccaaatgacgaaaccctgtctctaccaaaaatacaaaaaattagccaggcatggtagggcgcgcctataatcccaggtactcaggaggctgaggcaggagaatcgcttgaacctgggaggcagaagttgcagtgagccaagatcgcgccactgcactctagtctgggtgacagagggagactccatctcaaaaaaaaaaaagaataggaaacatccagaaagtttatcctgcatttctacacacagagtacaactgcaatatattttacaagttcaggcagccgcttcttggtagcaaaagggtcgtttccagaagtcctgtcagctctcaagtttccccttttggaggggaaagagctccccatgtcctaattctgtcactcatagacaccagcaaacagtgcaagacagattaatccaaaaagaatagcaattaacatccagtggtgtgaaaccagttcttagttgagactttactgagagcggtctctaacctacatcttaggaaggactataaccttcctaagttgggtcttgaatccaagtacagtcaagcatccttgccttgttttagaggctcctttaacccacgctgtcttaggagagactctgactttcctaagttgtgcctccaacctaatctcatcctttacccaggtatatggactcaaagtcagccaattggtatccacagataatttttctgggggagggacagaagtctcttcagtatagtccttttgtggttgccaggaaaatgttactagaaagaagtcttgatccataccccaagagagggttcttgtatcttgctcaagaaagaattcagggcaagtcataaagtgaaagcaaatttattgagaaagtaaagaaataaaagaaatggctttctccataggctggttgcacatttttatgtttactttttaattatatgctaaataaaaggtggattatttatatatctcctttttagacctttacgatgtaacatcctgatgttgccatggcatttgtaacctctcatggcactggtgggagggtaacggagaatgaccagaggtcactctcatcaccatcttggttttggtggcttttatcccacttctttactgcaagctattttatcagccagatctttgtgacctgtatcttgtgctgacctcctatctcatcttgtgacttagaatacctaaccatctggaaatgcagcctggtaggtctcatccttattttactcagcccctattcaaaatggatgctgtgtacctctgacagattctgtgtctggatgtgtaataaataaggaaagagagcaccatctaagtcataatgggaagggtatttctttctataaactgttcctgaagaacacaaaggatgaagaattttattaatcacagctatttactagggttatgtatgtgtttcatctttctacatctttttttgtcctatacatttcttctatttgactttcctcagttgtatattttataataaactggtaaacataactacagtgtttttctgagttctgtgagtagctcgatcagataattgaacttgagaaagggctcaggagtccccagtttttaaacagtagctcagacacatagatgggcctatggggtttgtgactggcatctgcagtgaggacaatgttgtgagactgagccctgaatcagggtctgtgctgactctgggtggtgtcagaattcaaatgttagacattgagttggtgttagagaattgcttgatgttcagcaaatgctacagatttggtgccagaagaaagatatcacagacgcctggcctgcagtggaactccaggtgtctgaaaatggaaggctctgctctcctgtacacagactgtcatactgcccattgtcctgtgattccaggtctcctcttagggtgagagaatgaaaactcagaggaaaggagatctaatgacagaccctctgtctcacagctgccaccacaggattcccacccactcacaaacacacccactagacattgatgtgtccacactcctcccaggactaggcaccaccatcaggaacttcaccacagcatatttgatcctagggtttcttgccaaaaagacgcaaaagtgtctacaactctcctggcatatccccactgtatctgcagcagtaacctgttttctccatctacctagcattatggagcacctgttcataatctcatctgcctgcatggacacagaaataaatcagagtacagccccactgggaccactatctgcagaacaaacagttctttccagttatattgcactcttctgcacgcatgggtttttcttaacttttctttttggttcaggcatacacgtgcaggtttgttatataggtaaaattgtgtcatgggggtttgttgtagattattttgtcagtgagttcctaaacatagcaccaaagaggtatttttttctgatcctctttgtccttttatccttcatcctcaactaggcctccatgactgttccttctttatgtccatgtgttcttattatttagctcttccttataaatggtgacatgcatttggttttctgttttgcgttaattttctaagaataatggtctccagctccatccatattgctgcaaaggacttaatcttggtgttttttgtttgtttgcttgttttttgagacaaactctttttttttcttttttttgagacgtagttctgctcttgttgtccaggctggagtgcaatggtgctatctcggctcactgcaacctcagcctcccaggttcaaacaattctgcctcagccacccgagtagctgggactacaggtgcatgccaccaagccctgctaatttttgtatttttagtagagatggggtttcaccatgttgctcaggatggtcttgatttcctgaccttgtgatctgcccacatcagcctcccaaagtgctgggattacagacagaagccaaagcgcccagccagacaaattcttactctgttgctcaggctggagtacaatggtgtgatctctgcttactgcaacctccacctcccaagttcaagtgattctcctgcctcagcctcccgagtagctgggattacagatacttgccacgacgcccagctgattttttgtatttttagtagacacggggttttagtatattggccaggctggtcttgaactcctgatctcaagtaatccatctgcgtcagcctcccaaagtgttgggattataggcatgagccacagtgcctggctttgtgtttttatatggccacatggtcttccttgatttttatgtaccatattttattttgattaaatctttattttatttttggagacagtgtctcactctgtcacataggatggaatgcagtggtgtgatcttggctcacttcagcctcaacctccaaggctcaaggtttaaggaatcctcctacctcagccccttaagtaactggaactataggctcacaccatcacgcctaatttttctttttttattttttgtagagatacggctttgccatgttgcccaggctggtctttaactcttgagctaaggcattccacctgccttaatctcctaaagtgctggcattacaagcgtgagccacctcatgctaccatattatattttttcaatctagtctaccatcaataggcaattaggtttattccgtgtctttgttattgtggacagtggtgaaatgaacatgcatgttttaagttttgcatttaagtcttcaattcaggttgagttgatttttatatatagtgtaaggaaggggaccagtttcaatcttctacatagtgctagctagttattccagcaccatttattaaatacagaattcttttcatattcctgtcaggtttgtcaaagatcagatggttggaggtgtgtggcattatttctgggctctctattctgttgcattgttctatgagtctgtttttatgccagtataatgctgctttggttactgtaatgtagtttgaagaggggcaatgtaatgcttccagcttcattctttttttttttttttgagacatagtctcgcactctctcacaggctggagtgctatggcatgatctcagcttactgcaacctccacctcctggattcaagtgattctcctgcctcgccctcctgagtagctgggattacaagcacacaccaccatgcctggctaattttcgtatttttagtagagattgggttttaccatgttggtcacactggtcttgaactcctgacctcatgatccgccaacctcggcctcccaaagtgctgggattacaggtgtgagccaccatgcccataatggttgaaagctttttaaacatctattgaaatgactttgtggtttttatctttaattgtgtttacatgatgagtaacatttattaattgtatgttgaaccaaccttttatttcagagatacagccaagttgatcatagtgcattagctttttgatgttctcctggatttggtttgccagtattttgttgatattttcatcaatgttcattaaaaatattggcctcaagttttctattttttgttttatatttgccagattttggtatcagaataatgctatttttatagaataagttggaaagaagtccccttttctcaatcttttgaaataatattagtagaagtggtaccaactctaatttttacatctggtggaattcagctgtaaatttttctgattctttgttgtttttggtgggtaggctatttatttctaattcaattttggagctcgttattggtatattcagggattcaatttcttatttgttcagtctttggaggatgtatctttgctccaagtttacaatcctcaagcttggcccagatgaagtctctacttatattcatgttgcctcagtttttttcttttaggtagacatattacttagaatgtgctagagcagcctctatgaagggatctcttctttgactgtactcggcttgctgtaatgcccaaggatgcagagtcaggctaacctcacctagaacctgcacataagttctggcctctgcctgggatttacaagacagggccagactttgggttgagaatgtactgaaaaccaacaaaaggcattttctgtattgtgagatgtcagtgtagaaatcttaaagcccccatttgagaatgtggctctttaagcttttcaatcttgttcagtgacctgctacagtatgtgagaggctcctggtgtaaatagaatctgatgatagaatctgtaagtgtaaacaagaatgagagatcaaggccacaaagtatccagagccataaccacaactatacctaccggtaattgtgatattggagtaaagtattctcgtccttcttcttacccaaaagctagcaaaaatcaggataggtgacccaggttctggggctccaccaaggcagttccattttctatttagaatcagcctgagtttctccagcctggcttatcactgggccatcagccctgggtcactgggaatcctctcctaatcacctgggtgtccttaagacatttgaggatgtcaagggtagaattatgtcaggctaacaagaatgattaattatgtttctgtctcgttgtaagagaaaggagacatcctgtgtttttttctccctcatacaagagataactttggttgttacccagatgagagtttctcaagttttctggtactagggtgaaagacaaagaggaggtctggtgactcaaacaaactaattgcttccacttcatatggtcattcaaaaaatagatgaagcagtcaaggtccctaccatccaggaaattttagtctagactagcaactggatacatggttgaattaagcattatatggttggtacagtgaatagaagtgtgcaaaaaaaccttggtccacttctttttaatattgttgtgacttctgaagttatcacctgaacgtatatttatggactgaagagttattattatttgtgtttcttttacttttctaagaatacatatttatcttctaataaaattatcctagaaaactttaaaagatccatttaaattgcttattagtatatgttataaaattgacagcagtggcaaaaatagattagtgttacataaactctgggatttaactttttttttcttttttcttttttagacggagtttcgctcttgttgcccaggctggagtgcaatggcgcgatctcagctcacctcaacctccgcctcccgggttcaagcgattctcctgcctcagccttccgagtagctgggattacaggcatgcaccaccaccctggctaattttgtatttttagtagagatggggtttctccatgttggtcaggctggtcttgaactcccgacctcaggtgacctacctacctcgacctcccaaaatgctgggattacaggcatgagccaccgtgccaggctgggatttaagtttttcttaggtaaacttaggaaaaacagaactggaaatactccagtgacatagaaaacaaattctacctaggttcttttccctgccccagttctgatcagattcaccatttttggaggccttatttaggtctggcctcactctggagtgttcccttacaaaactgatttataaagattcaagtttttgggggtaaatcctgctgactttctagagctgctgctcacagtatcctgaaacccaaaagcagatacataagaaaaataaactatacattttaagatcttaatttttaaattttgtagtaaaaccagtgcttacagaaacgttccatttagcagattttctgttcctgcagatccagtagctgctctacaagtcataaacaagtaaacataaacacaaaaaaatttctctaaactacattctaaatcctgagaattattgaacacttagtatgaactttcaaggtgttagtaggacataataacaaataataacacataatgtgttattcccagcacagtgctctgcaacatactattgagcacatagtacctgcttaataaacattgcattagttcatgtgtacatgttgttttttaaatgcagacttatttagacattgctgccttctgtgtcctctgtaaactttagagagccagcaaagaatatgaaactttacattttttgtctttatttgggtatcagaagtattgtattgtgacaagagtgcggcatgtaaaggactctgtgctgtgcctgctttctctaactaatgctaataatgagcccaaggggagcaacatcagcattgacacgggacttgtttgaaacacccatccatggaccctttccaaacctacagaatcacattacataaagtgggaccaacgttaccaagtgatttttgagctcattaaaggttgagaggcaatgcttagctaagtggttatcagcctagacttctcattagcattacatggccaatttgcagaaatctctttacttgtaccctttccacaggttctgtttattgttctaggtgaaagtattcatgttgttttaattgtgtctcatgtgactctaaggtgaggccagaatcaagtgtgtggggttcaagatacattcatgagagttaagttccacctttgcactaaaaggtagtcacagggaccgttctgtttggttttgatagggagaggtcagtgtcacccatatttccattactgtagcagaaattgctggtgtttgtggcaaaagcaggcacctgaagacagaaatagagaaacatatttttatattcattgagcagttcattgttcctgaatctctgctgttataaaggacagaaatgggtgtgctttttctgcagttcttagttcttttttctgtgggtgtgagactagcaggtaaacaggtggtgctgacgccttttaaggaattttttcaagacacaggtgtaacttctccagagaatgtcatctgaaaagcatttccaaagaagacaaaagaggaaaaatggctttttttttttttttcagctaaacatgtgtcagatgaagagctgtgtccactctgcctcctggagtgcgatgcatttagtccttgcaaacatttacttctctacttgtgtttctttcccctaatgagtttaactactataaaaaattcttgtggtagtcaagggtctctgcaaagtatctctctcctatatcccagagccttctctacactctctaaatcatggcttcttatacgccatgcagaattcttaccaggaatttttgatctgcactattaaaagtgtttcccttgttgctgttgaacgtggaaagatgtggatactcaagattcctattgggggaacgtccttagtaaggatggagaacatgtaatgttgaggtttcatatgtgttcttcattagctctgttcagaacaggattaagaaaatgcttatttaaactggatggcatttattactctgaaagttctgaaaaaaaaattattgcgagatacccgctttctagggtgctaaagaaagactactttaaattgttattaaaaattacagaacatagaagatatctgcatcttgaactctgcataaaactgatttttctgtgtggttaaattcagactatactttttggggggcaatatctcagtaatgatgctgtgttcttcggtgtgcgtcagcacatcacaaaaatttgtccttgtgcagttgattttaaaatttacttcaagagctcttggaaatattcatttcactgtagagttaattatttttctcctcattattaagtatctttatgtagccaaagaagagctgtgcataaatcatcacatttaatctggcagctgcctttctttcttaggttttctttgcatatgtctatctttagaaaatgaagactcttatctttgtttacaggccagaaaaatggggtaaaacacaggctcttccacttactggatgtttgacaaaatgttctttttgggcgaaatacattggcattactagtgagcttgttagaaattcagaatctcagactttatttcacatcttctgaaaaaaaaaaatctgcataagatctccagtgtattgtacacattaaaacttgagaggtgctgtctaactcaacatgtcatttttgcctaaaaaatatgcactactcattctttgtgatgcaaatataacactaaaaaatatacatgtttgtgttcatgcctttcgtttttatactttattgttcataaaattatcatatatacagcggtattgtggatcttataccattctcttctctcagagttagagaatacattagagaatatttctgtgttgaaaattgttggatgatttcagttattcctgtaagtcagaaccaattttctttactctctcatttaaccttaattcaaatgataaattctgcccgtggacacttgtaaatatgtgtgtgtgtgtgtgtttttcaggggccgttgacatttagggatgtggtcatagaattctctcaggaggagtggcaatgcctggacactgctcagcaagatttgtataggaaagtgatgttagagaacttcagaaacctggtgttcttgggtgagaataactttaatacacaattccttatatacactaaaggtttcatttctccatttttgtagaataatttttggtagtttatgctttgcataaatgcgtttctgatccctgttttcaaaaaattgcgaggaattatccatgcagaaaaaaatttcctcaagatgttttatcttagcctgaactttttgcattcctgagctggtctgtacccttcactctagagtagtggtaatctcagaaatttagtagtataaaatattgttgcccataggttaaaatctatttgccaccactaatttttgattcatgagcactgagtagcaaaattaaggacctacaaatttaaaatattttctaaatgtaagaactttctgtcattaaatagtattttgggatgaattttctagaatattctattacctcctctttactaagcacagtaataggtaggtaattagagaatatgagcaagattcatgttatttatttttaataaatcaggtattgatgtctctaagccagatctgatcacctgtctggagcaaggaaaagatccctggaatatgaagagacacagtatggtagccacacccccaggtaggtgagagtgaataaaacagttgacatagatgaaaggttggaagattacaaaaaaaaaaaagcagtccctataatgtgatttgggaagctgtgttccaaagcaaatagattctgggaagcctgaggtgtgtggtttttttgtttgttttctttttgttgttgttactgtcacatagggccatcttctgtcttaggcttttaaattctctaaggattctactttcccttcattgattttccttcaagttcacagtgagagccagagtcctcttcatggcatataaaagactgcacaatctgactgcatttccattgttttgggggacacacaaatatctgcatgattttgagaaactttatgttaaactatttttttagttctcttttgcatcatgtctaaaatgtgtgagagtagtggtcactgttctattggtttttatgttaattttctgcacattccatctttttttattagtatattcttgaaatatagtctgaaattataaaatataatgtctctctgctttgttctttttcctcaagattgctttggctattcaaagtttattgtagtttttttgttttgttttgttttttgttttgagatggagtttcactcttgttgcccaggttggagtgcaaaggcgccatcttggctcatcgtaacctctgcctccagcgattctcctatgtcagcctcccgagtagctgagactacaggcatgcaccaccatgagagtttttagtaaaaactcatgtttttataaaaagttttattaaaaaattggatttttagtatacttgccttggcctcccaaagtgttgggattacaggcgtgagccactacacccagcctttttttctattttatactttcattccattttggtcataggatgtaattcataaaatgtcaaatttaacaaatttttatgactccgtttttggcctaacaggtggtctatcaaagagaatgttgcataagctattttgaaggatgtgtttcctcatattcttgaggactcttctctatttctctgttaaaaataattgtacaggctgggcgcagtggctcatgcctgtaatcccaacactttgggaggccgaggcgagcggatcatctgagtttgggagtttgagaccagcctgaccaacatggagaaaccccatctctactaaaaatacaaaattagccaggtatggcagcacgtgcctgtagtcctagctactcaggaggcggaggcagaagaatcgcttgaacccaggaggcggaggttgtggtgagctgagatcgtgccattgcactccagcctgggtaacaagagcaaactccatctaaaaaaaaaaaaaattgtattatactgccttcagttcctctcttcacttactaatattctgtcttgttttatttttattacagaaagtggggtattgaaatttcctactataattatattgctgtctaggtgtttcttccagtctgtcaatatttgctttatatatttggaaccttagtgtgacatacacacagacacacagacgtgcacacacacacacacacacacaaaatttgtcataggttcccagttaataaatctattattgtttaatgtctttctttgtctctttgcagttttgacttaaagtactttatgtaagatatgacagtttttgacttaagatgtggcttttgtaatactattttgacctcttctgctctcatttggttaatatttgcatgcaatgtctaaatctatcttgccaccttcagtatgtttttaatcattagatgtcagctgacccttgtagaaaggcaaattggatcttggtttttaataattttaaataaatttctttattgaaagtatgtctcttgattggaaagttttctgaaacaaagagacttactaattttttttgttgttctatttgattcttgcatctttgtcccacattttctctctttgtttctctctgtggctgttttatttttactttgatatgcttttacttctttcttatgttgttttctgtgtctatacaggcatattctttgtggtacgtgggggattacataaaacctttaagagatacaatgtatttcagtctagttaaaaatgaacttttgttgcatgcaaaaattttttctcattacatatgttctcagatttgttcttgatgttgctaattatatttttatatgtatatttattaacatgtttataatgatttctatgcctttatctttcaaattttggggaataattaaaaatttcttctgtgccattatgataatgctaagaaatgtatttttgtgtatgtgcgtatctttcccagaaaataatgtgttttaatatgattttgtgttgctttgttaaatcatcttattttcattggaagcaactgttttcagcaccttttatatgtaaggaagtaccaatatactttttaaaatttggttatttttgaagtttgttttctttttatttagcaggacagatttggtgatggtattatactcacttgataactattttcttcagatttcactatatcacacagttttcttctgtcctgaaaaatttttgttgagaatccactggctatctcataagagtattcttgcaaataatatcactttttttttttttttttttgagatggagtttcactgttgttccccaggccggagtgaaatggcgcgatttcacctcgctgtgtcccaggttcaagcagttctcctacctcagcctcccgagtagctgggattacgggcatatgccaccacacccagctaagtttgtatttttagtagagacagggtttctccatgttggtcaggctagtctcgatctcctgacctcaggtgattcacccacctcagcttcccaaagtgccgggattacaagcttgagctaccgcgcccagccaacacatcacttttatcttgcagctcccgagattctcttttctgtgacttttaaaattgtgcttacatatgtgtttgatataaatatctttgtattctagtttgtttgttcagcttcttcatttttacatcactttttaaaagatttctgttattttttatatttttttacctccataatttctgtttttccaatattttaaatatttctgttcttatttccagttttctgattttctgtagttctctgtgttcatattttactcattgagtattcaatttattttgtttttaaaattaatgtatacattttttatttctttctgaaaaatttataataattttgttggtactacattgccctgttttgtatatattctaatcttttattaaaatttgcacattaaaaaaatgttacctgtcccagtctttgtaatgtggctttctcctggcatactttgaacaattgtctgggttagagattctgagagtctctcagacatattcttacaatgtgtcttgcctgaaattttgtgtttattttttagttaaaggaaattattcatcttctttgttaatactcagtaatcactcactgcacctgttttctttctgtggtcctgcagtctcttcactgctttaacatttacctttgatctcagcagacacaaactgtcattccaaattataccaccatttctttcagcactatatgtcatgggtgacagaaaccagtgtcttcaaaggcccctacaagcaagcaataaagatacatgagccagtattttacttgtgttttttaaatttttttttttaaggccacatttttttaattgacacctcaatctctacatacatacagtattgcacgaattataagtggatcaacaattatattattgatacaaactcatgagcatttacataaaactaccgctctaggttttggtgtgttttgtgccagctactttagtgaataaaagaaacataaaggaactcaactacttgaattcatgagaatcagctttcaataaaagcatatgtgtcatctcatagaatacttaatatgtcaaacccaggaaaatcagtaactaagtaacaaaaggaacacttattaagaaaatttgatgataaaaatgttaggctaaaatattaagaactttagcaactggactgaggaaccagaaagtatatgcacactgggaattttaagaaaagatccccatattctcctgcacaatgaggaccacattccaaaaacataattctgggttgttacaatgtcttctctgctacaaaccatagtttcaaagatgaaagaaacaagttcacataaaagggttttaaaattcttcccactcaaaataaaataaaaataatatgatctccatcaaattataaagaaattctatcaaaatggtgaccaaataaagaagtcagaccatttgccttcactgactgcctcagagggcagagcatgtgtcacctacaaggaaggggagatgggggtagagtccccactctcccctggcctgtggagtgggggtggacaggagccctttggcttccctggggttttgcttcctcacatagggaattgagggaggtgggctagatggctttaagagacccctcaactaaaagaatcaaagtcagcttgagatcctatctctgagcaggcacataaggtggcaaaagaaatggattaaaaaacagatggatgatgtctttctcaccttttaataccatcactgagaactaatctgtactatagttgaagaaaatctttgcccggtactattatagggtactcaatgaggcatctgacaatgaaatttttcatacaaatgtataaaaaggctatattaagtttgggtgggaaaacaatgcaccaccatgttactaccagcagtcaggacgtcctgtctcagattttaggagtcaccgatctgtttgggagaaatgctgagggggatgcatgttcaagccattcagtagagagctaaggagggcacactgttcaggaaatggataaacaggtgcccaggaaggcaactttaatgaaactgtttctaaaacaaaggatataagagacctaaatgatccaaggagagtgatggcttctcattttctgtcccctaatgagaatacaaatatttcttctgggatctaacacactagcttcattttcaagatgcatcactttattttccttacaaggcagcagcacattaagcacgtgagagtcacatgatttctgcagtgagcaccaaggcttccaggagttttcttggaacctacagccagaagagtcctgagatttcaaatattaaagctttctctacagccacacgtccctttgatgtttgggttattgaacacaaactcactggataatttgtcttcaacatagtccatttccgctcctaaaactgttagctttgctttctttttgatgaatactctgactccatcttgaataacttcttcatcagaatctccttttgtctttgtatattctagagtataagaaaggccattacagaccctggtttggacaccaacttttacacctacaagctcaggcttacctttttctttttctttttttttcgagatggagtctcattctgtcacccaggctgcagtgcagtggcgtgatctcagctcactgcaagctccgtctcccgggttcacgccatactcctgcctcagcatcccgagtagctgggactacaggcacctgccaccatgcctggctgattttttgtatttttagtagagatggggtttcactgcgttagccaggatggtctcgatctcctgacctcgtgatccacccacctcggcctcccaaagtgctgggattacaagcgtgagccaccgcgcctggccaggcttatctttaagaagttgttttactttggttactgctgaaggtgtcagggtgagggcggcctgggtgggctgcagcttcctcttgctcacagcctggacagttgcctggactaaggaagctgacatcttcaccatcccaatgccccagtgcctcaggccagagctcggctgcctcagcctgtctccatggacatggcaggtgcattctacttgtgttttttaaaatacatatataaaatgttggcaatttacttctttttttctttctttctttttttttttttttttgagatgtagtcttgctctgttgcccaggctagagtgcaatggtgtgattttgactcactgctacctctgcctcctgggttcaagcaattctcctgcctcagcctcttgagtagctgggattacaggttgagccaccacgcccggctggcaatttacttctttttgtttttttttttgagatggactcttgcactgtcacccaggctggagtgcaatggcatgatttctgctcactgcaacctctgtttcctgggttcaaacaattctgcctcagccttctgagtatctgggactacaggcacacaccaccatgcccagctaatttttatatttgtagtagagacggagtttcacagtgttggccaggatggtctcaatctcctgacctcatgatccacatgcttcagcctcccaaagtgctgggattacaggtgtgagccaccacatctggggcaatttacttctaaaggcattatgttatatcggggagcaggaacagctgtgttgggtaagtgtaacaaacttttttttcttctgtgtgactttttgcattgtgctcacttggggtactttaaacatttagttcatttataattttttctcagatgtattttcgttagtatgtttttgttacatatatatgtctataaaaaattagggcctttggtattttgctatatcatcttgtatatgtagtttgtataatgtcatagtttagatttgtaatctatatttatctgagtctagtaagtggagtaacttgatatttttatttctttcagttacatattctcattttgcccaggacctttggccacagccgggcataaaagattctttccaaaaagtgatactgagagaatatggaaattatggacataaagatttacagttaagaaaaggctgtaaaagtgtgaatgagtgtaatgtgcaaaaagaaggttataatgaactaaaagagtatttgacaactacccagagcaaaatatttcaatgtgataaatatgtgaaagtctttcataaatttttaaattcaaatacacataagacaagacatactggaaagaaacctttcaaatgtaaaaaatgtggcaaatcattttgcatgcttttacacctaggtcaacataaaataattcatattagagagaattcttaccaatgtgaagaatgtggcaaagcctttaaatggttctcaacccttactagacacaagagaattcatactggagacaaatcctacaaacatgaagaatgtggaaaaggttttaaccactccacaactcttactagacataaggtaattcatgctggagagaaacactacaaatgtgaaaaatgtggcaaagattttaaacagtcctcacaccttactaaacataagacaattcatgctggagagaaaccctacaaatgtgaaggatgtggcaaagctttctgccaattctcataccttactaaacataagataattcatactggagagaaaccctacaaatgtgaggaatgtggcaaagcttttaattggtactcacaccttaccagacataagataattcatactggagagaaaccctacaaatgtgaataatgtggcaaagcctttaatgtattcgcaacccttactagacataagataattcatactgaagagaaaccctacaaatgtgaggaatgtggcaaagcttttaaacagtcctcaaaccttactactcatgaaaattcattctggagagaaaccctacaaatgtggagaatgtggcaaagctttcttcagattctcataccttactacacataagataattcatactggagagaaaccctacaaatgtgaagaatgtggcaaagcttttaactgttactcctaccttactgcacataagttgattcatactggagagaaaccctacaaatgtgaagaatgtggcaaagctttctaccgattcatttaccttactacacataagagaattcacactggagagaaaccctacaaatgtgaagaatgtggcaaagctttctaccgattatcttatcttactacacataagatgattcatactgtagagaaacgctacaaatgtgaggaatgtggcaaagcttttaactggtactcacgccttactacacataagagaattcatactggtgagaaaccctacaaatgtgaagaatgtggcaaagcctttagtgtattctcaacccttactaaacataagataattcatactggagagagaccctacaagtgtgaagaatgtggcaaagcctttaatgtattctcaacccttactaaacataagagaattcataatggagagaaaccctacaaatgtttagaatgtggcaaagatttctaccaattctcataccttactacacataagatgattcatactggagagagaccctacaaacatgaagaaagtggcaaagcttttaactgttcctcacaaattactagacataagataattcatactggagagaaaccctacaaatgtgaagaatgtggcaaagctttttaaaaatcctcaaaccttactaatcataagataactcatactggagagaaaccctacaaatgtgaagaatgtggaaaagcttttaaccagtcctcaactcttactagacataagagagttcatactggagagaaaccctacaaatgtgaagaatgtggcaaagcttataactggtcctcaaaccttactaaacataagaaaattcatactggagagacaccctacaaatgtgaagaatgtggcaaagcttttaaccaatcttcaacccttactatacataagataattcatattggagaataacactacaaatgtaaaaaatgtggcaaaccttataaccagtactcatactttactacacataggagaattcatgcggaagagaatttctacaaatgtgaagaatgtggcaaaggctttgactggtcctctacccttactaaagataaaagagtttgactgggtgcggtggctcatgcctgtaatcccagcactttgggaggctgaggcaggcagatcacctggtcaatggtcctctacccttactaaagataaaagagtttgactgggtgcggtggctcatgcctgtaatcccagcactttgggaggctgaggcaggcagatcacctggtcaagagttcaagaccagcctggcccatatggtgaaaccccatctctactaaaaatataaaaaattagccaggtgtagtggtgcacacctgtagtcccagctactctggaggcctaggtgggagaatcgcttgaacccaggaggtggaggttgcagtgagctgagatggctccactgcactccagcctggatgacagagagagactctatctccaaaaaaataaataaataaataaaaaaaataagagagttcatactagagagaaaccctgcaaatgtgaagaatgtgagaaagctcttaaccagtcctcacaccttactgcacataagagaaatcatactggaaggaaaccctacaaatgtaaagaatgtgagaaagcttttaactggtactcatgccttactgcacataagataattcatactggagagaaactctacaaatgtcaagaatgtggcaaagcttttaaccggtactcaacccttactacacataaggtaattcatgctggagagataccctacaaatgtgaagaatgtggcaaaggtttttattgattctcatactttactaaaaataaggtgattcattctggagagaaattctacaaatgtgaagaatgtggcaaaggctttaatttgtcctcaacacttactaaacagaattcatagcagagagaaatcctacaaatatgaagaatgtcacaaagcttttaaccacttctcaaccctgatgacacataaggtaattcgtgctggagagaaaccctacaaatatgaagaatatctcaaaactttttatagattctcataccttattaaacataaaatcttacaggagagaaattatacaaatgtgaagaatgtggcaaagcttttaagaaatcctcatccattactaaacaagataatttgtactggagagaaaacctacaaacgtgaggaatgtggcaaagcctttaatggtcccctcaactttctgcacataagataatttatactgtggagaagccttacaaatgtgaaaaatgtagcaaaccttttaactaatcctcaacccttactacacataagataattaatgctggagggaaatcccacccatgtggcaaagcttttaatcaatcctcaaaccttactaaacataagataactcatactggagaaaaatcttagaaatgtgaaggatgtggtaaagccgttatccagtcctcaactcccactaaacataacataattcatactggagagaaacctcacaactgtgaagaatgtggcaaagcttttaaccagtcctacaaacctttttgaacaaaataattcatacaggagagaaacactacaaatgtgaggaatgtgacaaagcctttaaccagtcctcaattcttaccaaacataagaaaattcatattggagattaaccttatgagtgtgaaaaatatggcaaaagctttaactagttctcagttattattattatttttagagatggagtttcactcttgttgccaaggctgcaatactgtggcatgatttcagctcactgcaacctccgtctcccaggtttaagcaattctgcctcagcctcccgagtagctgggattacaggcatgcaccactatacccatctaattttgtatgtttagcagagatggggtttctccatgtagatcaggctggtcttgaactcctgaccttgtaatctgcccacctcagcctcccaaagtgctgggattacaggcatgagccaccacgctcagccactagtcctcagatcttaacacacataagataattcatactggaaagaaactccacaaaccagaaagatgcaataatgcttttgacaacacctcaagcttttctaaccataaaaagaatcatattggtgagaaatcctagaaatgtgaagaatgtgacaaagtctttaaatggttgtcatacttgacttttttctttttttgagatgaagtctcactcttgtcccccaggctggtgtgcaatggcatgatgtcggctcactgcaaactccgcctcccaggttcaagtgattctcctacctcagcctcccaagtagctgggattacaggcacctgccaccacgcctggctaatttttgtacttttagtagagatggggtatgaccatcttggccaggctggtctcaaactcctgacctcaggtgatccgcccacctcgggcctcccaaagtgctgggattacaggcatgagccaccactccctgccttacttgattacattcaatataattcatactggaaagaaatcctacaagtgagagcaatgtggcaaaacttaaccaccttattgcacagaaaagcatttatgtttgagaaaaattatacaaatacagactgtgaaaaagacattaatatctgcttacatcttaacaccagagagttcatacttaataaaagcaagataagggcaattactgtcaaaaggtctttcagaaaaatataaccctttaaagtgaagaagagaatttatattgaagatggacattacaaacataaagagggttgtagtacctttacttgaatcaaattttattgtacacattttgtactagaggaaaactctgaagcagttgctcaagctttgttcaacattagggcacttatattggaaaagtgtcttgcagatataataaatgtggaaaaacactttttcaaaaactacatcagaaaacaccagagtttatactgaagaatatttttgaagatgcactaaaaatgaaaaaatatttaatccaaattagggctatgtaaatatcagaatttataatagaaatatataaggaactgacactgcagatatactaagtcaagagttctgagtatagaaaataatctaaaactaaagttgatagaaaaagtatttgtatataaatttaagaggagtaaaagattttttgcagagtaataactacattctaagtatactttatttcttgaaaaaattacagactttgaaagcaaatgatgtaattcaacactcattttctggtgtttcttcattcttattcacttgtgaaagcatgtgataattgttgcatcaaaggtatgagagattcttttccattaggtgggcatttatgatcttttctatggacaagtaaggacattagaatgtaagatgcatgatgaaaaagtggagaggttctttgtggttaacttatactcttgagtgatatatgaggtaggtgttaagagtattgttcttttgcattatgagaaaactagtagtatattattagtatattattgtactaattgtacttttatataataaaatgcagcacatttttaaaattttacattatgtgtgaagttaatggtttcaacatttttaacatgttaatctcttgccagtggctttaaagtatagataaattaaataataatattcctgttgggtaaatatttattcttattttaatcaattaaatttatttttcttaatttttgtgggtatatgagtatatatacttatgccatatatggcatattttgatacacaaatataatacataataatcatgtgctaaatgtggtatccgtcacctctagcatttatcctttgtattactgacaatcgaattctacacttttacttattttaaaatgtacaattatggccaggcacagtggcctcacacctgttatcacagcactttgggaagctgaggcgggcagatcaccaggtcaggagttcaagaccagcctggccaacatggtaaaaccctgcctctactaaaaatagaaaaattagctgggcatggtggcaggcacctgtaatcccagctactctggaggctgaggcaggagaatcacttgaattcgggaggtggagattgcagtgagccgagatcgtgccgctgcactccagcctgggtcagagagcaagactccatcaaaaagagaaagaaagaaagagagagaggaaggaagggaagaaagaaagaattggtctctactcttatgaaactttcagtataatttcataaaatcctcatgcattcctgagaagtggatacctctgaagtttcctaaagccctactaacccaaagtaaccagtatctgaattttgtattatcatttactttatgcaattttatctataaacaatatacgtttcagtgttgccagatttttggctctagataaattctacaatttttcatctgtgacttgcttttttatttacaattgtttccttctatttttccatgttgctttgcatagctacagttgtccatttcactgctgcatagggtgaatatacatcaatttttaaaccaattctatagccagtggttatttgtgaattccaattactctatattttaccaactcttggaattactagacatattgaggggtgaagccagctggacttcctgggtcaaatggggacttggagaacttttctgtatagctaaaggattgtaaatgcaccagtcagcactctgtaaaaatgcaccaattagcactctatgtctagctaaaggattgcaaacacaccaatcagcactctgtaaaaatgcacccatcagcactctgtgtctagctaaaggattgtaaatgcaccaatcagcactctgtaaaaacccaccaatcagcactctgcgtctagctaaaggattgtaaacacaccaatcagcactctgtaaaatggaccaattggtgctctgtaaaatggcccaatcagcagtacgtgggcagggccaaataagggaataaaagctggccaccaggagccagcagcagcaacctgcttgggtccccttccatgctgtggaagctttgttctttcactcctcactataaatcttgctgctgctcactctttgggtctgcaccacctttaagagctgtaacactcaccacgaatgtccacagcttcattcttgaagtcacctagaccacaaacccaccagaaggaagaaactctggacacattggaaggaacaaactccagacacaccatctttaagagctgtaacactcactgcaaaggtctgcggcttcattcttgaagtcagcgagaccaagaatccaccagatggaataaattctgggcacaatattttttgacaaagtggagaatcagaatggtatatcatttatagttttaattagcatttctatagttactaatgaagttagcatttttagaagttaattggtcaattgtgctttaagatgtgccatctgtctatttttaatgtatttcatttctttttgtattcatactctataaggtatattgtctaaatactaattttttgtaatatgcgtttttgtagatttttgtcctagttatgatttgcctttccaccatctatatttaaacatgtttttataagttcttaatcaaaaattcttagaatttggtctaatttataatgtgccatgtttaagacattgttttaccccactgttataacaacaataatatcctgtattttctcctaaaagttttaaattctcaatctatgtgaaaaattgttgtgtcagttgctgtgcaggaatccaatctacccagctagaaccaattgtttaggtactagcttattgacttgttctactttgccagtattactgtaatactgagctctcattttaatctattggctgggaccatagatgcaatatttaataaaaatgttgatagcagcatccttataatgtttatgacatcaaaagacaagttttcatggtttatcatgtacatttgctgtagtacattttagataccttctatatttagaaaataaaatttccttttatttttagtttgctaaaaggtttttaccaagccctttttctgtgcctattgtatatacacatatagattttacaaagtttaacttaccttgtactctcgagataaacttattcatggttttacttttttttttttttttttttgagatggagtctcgctctgtcatccaggctggagtgcagtggtgcaatcttgtcttactgcaacctctgcctcctcctgggttcaagtgattctcctgcctcagcctcccgagtagctgggactacaggtgtgtgccaccatgcctggttaatttttatatttttagtagagacggaatttcaccatattggccagactggtcttgaactcctgacctcatgatccacccaactcggcctcccaaagtactgggattataggcgtgagccaccgctcccagccgggtttacttattttatacagagcaagattcagtttgttagcaaatgctttaaaactttaaaatctgtctttatgaatgatacttttatagttattcatgttttgtctctgtcaatctttggtattaactctcagaaattgagttgtgcagtgtttttacttcttctgttttttgaaaggttaaataatatcaacagtatgcttttcatttttaaactttaaatgtctgaaagacttacctgtagagttttctgacattgacattttttgcatatgtgttaatttcatctgctctcatctagtttactagttctgtctagtgcacctaagttcaaatgtggttagtgagttcttttagttattgtattattcattccacaacttagttactttttaaattgttttatagtttctaatgccctgtagatactttcatttgtcttatttaaatatgttaagcctagtagtttttaatatttttgtcgataaatctaatattggatgtctttgcaggtttgtttctgttattccttcttctggtgtctttcacactgtcttctttattgtgagttttgccatctttggttgcttgctagtcactgttcatagaaaattactttcaagtttcatcaaggactggatgagatgttaccttctttaagaaagtttgcttttgcttctttcagttttctgaaaattttacaatgtggaacaatcatttggacaactttaagtaatgtggttcattcaaaatttatataactgatggagaaatttatgtaagatcaatgtgtggtgacaagattgtagaaatttctttctcttttgaaaatttttctttatcacctgccctcaacctcaagacaatcttgtatgccattcctcagtgttgggaagaaagggactgtttgggtcatacctagcctttgaactcccaggttaattttgagaaggtttttaaataatttccaagtgctaaacatccaaaagtacataataaatattaggtaacatcattatactagtaatcctgaacacaatattttaagtgttcagctgcactattgtgttctatgaaaagaaggtttttgtttagaatattttccaatagattgattacgtgttataaattgcaaatatgtttgtagtttgtataaggcaaagaatgagatgtttggattcaaggatgcataagatcaaacactaagacaattttctatgtagttgaggagaaagagtgggtgttgaaaaagccaatgcagctcatggattgcaagtttctgcctcctgctcccacctaatctggctgtgcctggctgccagcagccaagatttgctttaaaatactgaagaaaaagtattaagaaagccaaccccatagtctgtttacatacacaaatataaagcaatgttcttctctaatgtgaggaatatgttcaggaaagctaaaatgatttcagagtaagaaagtaaaaagttggcagcatgagcacatctagccctacatactgagttgcttttggagtgaagagctaacatgaaaggcaagagaaaaattagaaaataataattttgccattgagtactttatattttttatatttccatgaattccataaataacaaaattgtatgaatgcattttttctgtaaacattattttggatatagtgtctgactctgttgccccggatggagtgcagtggtgagtttacagctcactgcagcctcgatatacagtgctcaagtgggtctttcacctcagcctctcaagtagctgggactacaggtgggtaccaccatgtacagctaatttatttgatttttagttttgataagatctcaatatgttgccaacacttgtcttgaactcctgaactcaaacaatctttccccctcatctttccaaaacaggattacaaacataaacaagcacactttacccatataagtatttttaaatattacagacagcactttgggaggctaagacaggaagattgcttgaacaaaagagtgtaagatctgcctgggcaatgtagcaatacctcatccctacaaaatgaaacaacaacaacaaagagaatgctggtatcatgtgaaaatcactacactcaacctcagtgcccttttgcagacaaactctatataagtttgttttatctttacaaagatttgcatgtgtatgtgtgattttatgtacctttcgaagtagtattgcatgtgtgtttccttgggtgagatagtgtgtttgatggttataagagcaggctcaaagtacctgtaaaaccttgggcaagttgtttttgtttgtttgtttgtttgttgtttgtttgtttgtttttgtttttgaaatggagtcttgctgtgttgcccaggctggagtgcaatggtgcaatctcgattcactgcaacctctgcctcctgggttcaagcaattctcctgcctcagcttcccaagtagctgggattacaggtgccttccaccacaccaggctaatttttgtatttttagtagagacggggtttcaccatgttggccaggctggtctcgaactcccgacctcagatgatctgccctccttggcctcccaaagtcctgggattacaggcctgagccacctctcctggccgggcaaacttcttaacctctctgtctcatctatcacttgggaataataacatggccagtaaaatcagtgttgttctttgaacatattaataaagtagaaaaagttattttaagagcaataaaaatattaaacacaaaagaggatatttatagataaagtcaagattttaaaatgatattgtagggaggctgaggcaggagaatggcgtgaacccgggaggcagagcttgcagtgagccaagatcacaccactgcactccagcctgggcacacagcgagactccgtctcaaaaaaaaaaaaaaaaaaaaagtttgcctttaatctattttcttcatgtctaaacatgaaagctcaaggctgtggacaaatttgaagacatggagttttcttctcatgtagccctatcatttttttgttttgttttgttttaagacagagtcttgctctgttgcccaggctggagtgtagtggcgcgatctcggctccgcctcccagattctagtgattctcctgcctcagcctcctgagtagcttgggattaaagtcacccaccaccgtgcacggctaatttttgtatttttagtagagatggggtttcaccatattggccaggctggtctcgaactcctgaccttgtggtctgcccatctcagcctcccaaagtgctgggattacagcctcccaaagtgctgggattacaggcgtgagctaccatgcccaggcttttttttttttttttttttttttttttttgagacggagtcccgctctgtcacccaggctggagtgcagtggcaagatctgggctcactgcaaattctgtctcccagattctagcgattctcctgcctcagcctcctgagtagcttgggattaaagtcacccaccaccatgcacggctaatttttgtatttttaataaagatggggtttcaccatattggccaggctggtctcgaactcctgatcttgtgatctgcccacctcagcctcccaaagtgctgggattacaggcgacagctaccgtgcccaggctttttttttttttttttttttgagacggagtcccgctctgttgcccaggctggaatacagtggcaagatctgggctcactgcaaattctgcctcccaggtttaagtgattctcctgcctcggcctcctgagtagctgggattacaggcatacgccaccacgcccagccagtgtatatatttttagtagagaccgggtttcaccatgttgtccatgctggtctcgaactcttgacctcaagtgatccgcccacctcggtctcccagagtgctgggattataggcgtgagccaccgcgcctggtggccctatcattctttgttcactgtatgatctttagaagaaaggtgggcaacaggtggccagcagtggtctacctgtggtgattttattcttgatatcttctgacctttctatggccactatctgttccaccctcggaacagcacagagactttggtagagagaggctgtcccctcaccactggcagaatatggacgttcagacccttcaccttcctgacgtcagagctgacacattcaatacaacagctattggccatgtatggccggctactgggtgcctggaatgtcgctgcaatttgctagaaaggtaaaatacagagttagtttcaaagatacagttccaaatatatatatacttcattaatctttacatattgctcacatattacaatgataatattttggatatattgggttaattaaattgttacaatgaatttcacctgtttcttctccttctttttaaaatttttttatttttgagatggagtcttgctctgtttcccagactggagtgcaatggcgtgatcttggctcacctcaacctctgcctcctgggtttaagtgattctcctgcctcagcctctctattagctgggattacaggcacctgccatcatacccagataatttttgtatttttgtagagacggggtttcaccatgttggctaggctggtcttgcactcctgacctcgggtgatccgcctgcctcggcctccccaagtgctgagataacaggcatgggacactacacccggctttcttttctttcacttttattttctttcttctcttctcttcacttttctttcttctttttccttccttccttttccttccttccctctttccttctctctctctctctttcactctttctttctctctctctctttctctcttctttttttttcttgagatggagtttcactcttgttgaccaggctggagtgtgcagtggggcgatctcggctcactgcaacctctgcctccctccacctcccgggttcaagcgattattttgcctcagcctcccgagtagctgggataacaggcgcccaccaccacgcctggttattttttcttatttttagtagggacggggtttcatcatgttggccaggctggtctcaaactcctgacctcaggcgatccacccgcctcggcctcccaaagtgctgggattacaggcgtgagccactgcgcccggcccttctttatttttaaagtctggctactagaaaatttaaaattcacatgtggctcacatcttatttcataagattggctccttttaaaaatctcaggctgctagttcaaaggactaggagccaggaaggtcataaaagctgaaattttaaaataattatttttttaaatttgtgaatagccatatattatttataagtgcttatgaccttatacacaaggttaagggaaaataccctctaaggtgtgcctggctcagctcagggaggaagccctgcctgaaaaggctgcagcctaggctatcactctttcttcactccgcccagcatttggtcatatcttctgtcactcagggcctgaaggggcgggcccttaaaccgtatccaatcagacacgcagaactgggaaccgtccaattaggcacacatttggagcggcgaggacggcttccgggatgtggctgggccattgtttctctctgctgccggagctccaggtctacccttcactgctctgtgtcctcagcgtgtgtggcttcgtgacctgaagatactgggaaatccatagctaagatgccaggaccccctgaaagcctagacatggtgagagtgctgggtccgacatcacgagagaggggaaggagttgctcggaaccggtgggaagtggctgtggcgggactcaggcctccccgcagtcagctccacaatctgctccctgagttctccttgcccagctcggcctcagtctccttcagccgtaagttggcggctgcgccaacagccggggccccgggcgtcctgtctcttccctgcactgtgactgtgccctgcctggagtcctctctggcagttctgcacccgcagcgccgcgtctttctcagattgtgcggggaccacgggagggtcatcaggggagaatcctgacttggggtgcgggttcatgaatgggaagagctttggtccgtggggttcccagttgctattttctcctattaaaaatttatgggcgtcactgcaaaaatattaaagaatgtaatcaaagagtggttctagaattgtagagcacccagctatggtttgtagtttgtggtctgtgggagaggcttgaaggaaagtcttttataaaatgcatgatgaagaaaccaaatttactaattggttaggtacagttacatggtttcttaatatgtgcgttaaaggtgaaaatttcctggttatgtaatcagagcttaattggcagtttacagttgctgaagcctgaattttgtttctctgaatgtagtaattaaaaataatgcacctgagttagattttttttttaaagtaagaattcagggactagaaatacctcagtctaattgcctgccacttaattattttcacactccacagggaactgattttctgctgtatttttcacctgtgtcccaagcagagtcttggaaccaatcccccatttctccggcctcactctggcttgcagtaagataatttccagtttcctctgacgttcctaaatgccaccttttcctccctaattcacattatcgcctatttgtcttttactgtacttttttataccatattttaattatttttttggcaaagcattaaatggttaaatggtgcatttaaagagatttgttatctgtttgtaaatatttcccatgaaaagaaggcaaataataataccctgacactgcattgtagtaaatctctgtctcttttgctttcatcttgtctaggcacagagatgttaccagaatgtttttgggtcgaagttctcctttggaaaatctatggggtgatgtgtcctcagccaccctttggttttttcctggtcatgggtttcagtactatctggggataaaccaagataactgccatggttatgttagctagagtgtccattggatctcagcttctggtttattttctcccataagatgacctgaggtatggagtgtatcctctcaagggagcaagtggatattctggggctgaggggaatcttccggtgtactcttattttgaaacgggtaaccctttgaaatgttaaaattgccttccctcaaccaggcttccatttcttggagacaaattgctggtcagccaatcagatgctggtaatgaggggaaaacacagaaataatttctgccccctggattctctaagggggcagaaaaatagtgaaattaatatagtaaaagaaaaagagtaaaaaaaaaaaagtgaaaaatttgtggcccaaaaaatagtatcccaaaagacaaacaacaagaacaaaaacaaaactgactccagtgagatggtgtaagagcttgcaaagtaaaacgcaactgggacagtcaccaagaaatactgcagtgtctcctgaatgggtggttcttgagcacacaagtgagcaggagtgggtggaagaatctctcaagttattgaatggcctgacttgaaaggtgagtcagacacatctgttatttatttattttttattttttatttttttatttttatttttttgtctcactctgtcgcccaggctggagtgctgtggcccgatctcggctcgctgaaagctctccctcccgggttcccgccattctcctgcctcagcctcccaagtagctgggactacaggtgcctgacaccatgcccggctaattttttgtgtttttagtagagacagggttccactgtgttaggcaggctggtctcaatctcctgacctcataatccatccgcctcggcctcccaaagtgctgggattacaggtgtgagccaccatgcccggcccacatctgttatttaaccagcactgccactcctggatttgtcaccttgaagagatttgttcacttattttgacctcagttttttagctgtaaattgcattatattagtaggacttgaaaaggtagaaaaatatttacaaagggcataaaagatttgggtttcaaaaaattatatctaatcatatatgtcatttgttaaaaattctcatgtacctttttctttcccagagtgagtttttgaattttctcaggtgtgttttttttatagctgggtgatttcaaacagaatttcaaggcttagcttttagagtgctgccaagaaaaaggagagaaaaaatctccatttcatttttgctgtagaaaatgaatacatttccatgagaaaatgcggtaggtaattggtgagttacgtagattcataaaaacgtaagttcctttttttgcaaggtaaatttttgacagtgaatatctctgttcaaatcctgttatcttgatttgtgagtttcatgctaaatattatgagatgaaacttgatactgcctggaagtgttttcatatgactcattgttaactgcatgatttttagtggaattaatagaataagacatttattttctaaaagaaatagatacttttgcttttcttattaaggtatacaatataagcaacttggccgggcgcggtggctcatgcctgtaatcccagcactttgggagtctgaggcgagtagatcacaaggtcaagagatcaagaccatcctgaccaacatggtgaaaccctgcctctactaaaaatagaaaaattagctgggcatggtggcacgcacctgtagtcccagctacttgggaggctgaggcaggagaatggcttaaacctaagaggttgaggttgtagtgagccaagattgtaccactgtactctggcctggtgacagagagagactccatctcaaaaaaaaaaatgtaagcaccttaaaattttttttcccgtatgtgaacactgtgtttcagtaattttgctgaattttttaaatacttaatttcaaaaaccaagtgagtaactctaacgtgaaaattaaaggttgagcccagtgactcagagctaaggctaatactgagcctgcaaaaggagtttattaaaggcctagttagttttttttctggagagcctcccctgcagatgttccagcctgctcactccagccatggaagaagcctttctgctgacagaagctacagagtcctggaaagctacaggcagatgcagttaaggttaagataaaaggggacagggagggtcatactgaccatgtagttgttattgtacatcagggatgctatgatttagtatcctgaaactttgctgaagttgtttattagtttaaagagcttttctactgagactgtagggttttgaagatacagaatcctgtcatctgcacacaggaatagtttgacttcctctcttcctgtctgaatgccttttatttctctctcttccctgattgttctggccgagactttgaattctatgttgaacaagagttttgagaaaaagcattcttttcttgtgccagttttcatgaaggaatgcttccagcttgtgttcattttgtatgttggctgtaagtttgtcatacttagataactcagtattttgatgtatgtacctccaatgcctagttttttgaaagttttaaacatgaaggatggtaaatttcattgcaagcttttttaacatctactgaaataaccctgtggtttttgtctttagttctgtttacttgaggagtaacatttattaattgcatgttgaaccaaccttttatttcagagatacagccaagttgatcgtagtggattagctttttgatgttctcctggatttggttttccagtattttcttgaggatattttcatcaatgttcattaaaaatattggcctcaaggtttctatttttttgttttatatttgccaaattttcatattagaataatgctgtttttacataatgggttggaaagaagtccctttttctcagtattttgaaataatcttagtaggagtggtaccagctcttactttacatctggtagaattcagctgtaaatttgtgtggttctttgttttatttttggtgggcaggctatttatttatttatttattttattttattttattttttgagacagtctcactctgtcgcccaggctggagtgcagtggcacagtctcagctcactgcaacctccacctcctgagtttaagcaatgctctgcttcagccacctgagtagctggaattacaagtgtgcaccaccacacccagctaatttttgtatttttagtagagatggggtttcaccatgttggccaggctgttcgctgttcttgaacttctgacctcgtgatccactcgcctcggcctcccaaagtgctaggattacaggagtgagccaccatgcccggtcagctatttatttatctacttatttatttatttcattttatttatttatttatttttgagatggagtctcgctctgtcacccaggctggagtgcagtggcacgatctcggctcactgcaacctccacctcatgggttcatgccattctcctgcctcagcctcccgagtagctgggactacaggcacccgccatcacgaccggctaattttttgtatttttagtagagatggggtttcgctgtgttagccaggctggtctcgatctcctgaccttgtgatccacctgccttggcctcccaaagtgctggggttacaggcatgagccaccatgcctggccctggccagctatttattactaattcaattttggagcttgttactggtctattcagggattcaatttcttatttgttcagtctttgcaggatgtatcattgttccaaggttataatcctcaagcttggccctgacgaactctctaattatattcatgtttcctcagttttttccttttaggtagacatattaatagaatgggctagaggagcctctatgaagggatctctcctttgattgtactctgcttgctgtaacacccaagaatgcagagtcaggctaaccccacttagaatctgcacatagggtcaggcctctgcctgggatttacaagacagggccagactttcaattgtgaatgtaatgaaaaccaacaaaatgcattttctgcattgtgagatgtcaacatagacatcttaaagcccccctttgagagtgtggctttttaagcttttcagatcttgtttagtgacctgctacagttatatgagaggctccaggtataaatagaatctgatgacagaatctataagtgtaaacaagcatcttaagagtgagggataaggccacaaagtatccagagctatgaccacaactatacctacctgtaaattgtaataatggagtagagtattcttgtccttcttacccaaaagctagcacatcaggataggtgatccaggttctggagttccaccaaagcagttccattttctatttagaatcagcatgaatctctctcagcctggcttatcactgggccatcagccttgagtcactgagaaccgtctcacaatcacctaggtgtctttaagacatttgaggatgtcagggacagaattgtgtcgggattacatggccaatttgcagaaatctctttacttgtgctctctccacaggttctgtgtattgttctaggtgaaagtattcatgttttaattgtgtctcatgtgactcttaaggtgaggacagaattaagtgtgtggggttcaagatagattcatgagagttaagtttcacctttgcactaaaaggtggtcacaggaactgttccgtttggttttgataggaagaggtcagtgtcacccatattttcattactatagcagaaattgctggtgtttgtggcaagggcaggcacatgaagacaaatagagaaacatatttttatattcattgagcagctcattgttcctgaatctctcctgttataaaggacaaaagtgagtgggctttttctgcagttcttctttttttctgtggttgtgaggctagcaggtaaataggtggtgctgacttctttacaagaattttctcaggatgcaggtgtaacttctccagagaatgtcatctgaaaaggatttccaaagaaggcaaaagaggaaaaatggctttttttttcagctaaatatgtctcagatgaagagctgtgtccactctgcctcctggattgccatgcgtttagtccttgcaaacctttacttccctacttgtgtttctttcccctaatgagtttgttttaactactttagaaaattcttgtgatagtcaagggtctctgcaaaatatctctctcctatatcccagaaccttctctacactctctaaatcatggcttcttatacgccatgcagaattcttaaaatgaatttataatctgcactacttaaaatgttccctttgttgccattgaacgtgggaaaatgtagatattcaagattcccattggcggaaagctggggtccttagtaaagataaataacatgtaatgttgtggtttcatctgttttctccattaattctatgcagaacaggattaataaaatgcttatttaaacaggatggtgtttattaccctgaaagttctgaaaaaaagttattgagagatacctgctctctcaggtgctaaagaaagactactttaaaatgttattaaaaattgcagaacatagaagatatctgcattttgaactctgcataaaactgatttttctgtatggttaacctcagactataatttactttttgaggggcaatatctcagcagtgatgatgtcttcttctgtgtgcatcagcacatcataaacatttgtcctaatgcagttgattttaaaatttacttaaaagagctctctgaaatatttatttcactatagagttaattatttttctcttcattattaagtatctttatgtagctaaggaagagctgtgcataaaccatcacatttaatctggcagctgcctttctttgttaggttttccttgcatttatctgtctttggaaaatgaagactcttatctttgtttacagggcagaaaaattgagtaaaacacaggatcttccacttactggatattgacaaaatattctttctgggccaaacacattggcattactagtgaacttgttagaaattcagaaactcagagtttatttcagatcttctgggaaaaaagaatctgcacaagatctccagtttactgttcacattaaaacttgagaggtgccttctaactcaacatatcttttgtctgaaaaatatacacaactcattctttgtgtggcaaatatagcactaaaaaatgtacatgtttgtgtttatgcctttagctttatactttactattaataaaagtatatatacagtggtgttgtagatcttataccattctcttctctcagagttagagaatacattagagaatatttctgtgttgaaaattgttggataatttcagtcattcctgtaagtcagaacgaattttctttactttctcatttgaccttaattcaaatgataaattttgcccacgtgtaaatgtgtgtgtgtgtgtgtgtgtttgtgtgtgtttgtttcaggggccgttgacatttagggatgtggccatagaattctctctggaggagtggcaatgcctggacactgctcagcaggatttgtataggaaagtgatgttagagaactacagaaacctggtcttcttgggtgagaataactttaatacaaaatcccttatataccctaaagttttcatttctctgttttcatagaataatttttggtaatttatgctttgcataagtgagtttctggtgcctgttttaaagaaatcttgaagaactgtccgtgtggaaaaaaatttcttcaggatgttttatcttggcctgatctttttacatttctgagccggtctgtatccttcactctacagtagtggtaatttcagaaatttagtagtataaaatattgttgtccatatgttaaaatctatatgccaccactaattttttatccatgaatactgggtggcaaaattaagcacctacaaatttaaaatattttctaaatgttaagaactttctgtcattaaatagtattttgggataaattttctagaatattctattacatcctctttactaagcatggtactaggtaggtaattagagaatatgagcaagattcatgttatttatttttaataaagcaggtattgctgtctctaagccagatctggtcacctgtctggagcaaggaaaagatccctggaatatgaagggacacagtacggtagtcaaacccccaggtaggtgagagtgaatgaaacagttgacatagatgaaaggttgaaagatttaaaaaaaaaaaaaaaaaaaaaagccagtcctggccgggagcaatggctcatgcctgtagtcccaggactttgggaggccaaggcaggtggatcacctgagctcaggagttcgagaccagactggccaacatggtgtaaactctgtctctactaaaaatacaaaaattagccaggcgtggtggcagttgcctgtaatctcagctcctccggaggctgaggcaggagaattgcttgaaaccgggaggcagaggttgcaatgagccaagatggtgccactgcactccagcctgggggacaagagtgagacttcatctcaaaaaaaaaaggaaaagaaaatagttatcaagtgaatataataccatcaccaaatctgtcctgctgatttgggaagctatgttccaaagcaaagagtttctcggaagcctttggcatttttttgttttttttttgttgttctttttctcacatagggccatcttctgtcttatgcttttaaattctctaaggattctactttctcttcattgatactcctttaagtttacagtgagagccaaatcatcttcatggcatataagagactgcacaatctgactgcttttccattgttttgggggacacacaaatatctgcatctgcatgattttgagaaactttatgttaaactattttattagttctttttttgcatcatttctaaaatgtatgagggtagtggtctctgttctattggtttttatgttaattttctgaacattccatcctgtttttattagtatattcttgaaatatagtttgaaattataaagtatgatgtccctctgctttgtttttttttctcataattaatttggctattcgaagtttattgtagttttttgtaaattttaaaatcgtagttttcattactataagaaaaaaatgccactggaattttgataggtcgtttgctgaatctatagattactttggagaatatggtactttaacagtatttattttttcaatccataaatatgaaatatttgtaaatttatttgtgtcttgcctaattccttttattgatttatatcttttattgttaacattttttgcctcgggttaaatttgttcttagaaatttattattttaattatatttttaaaaagattgctttcttggctgcacggtggctggggcctgtaatcccagcactttgggaggctgaggccggtggatcacttgagttcaggagttcgagactagtctcgccattatggtgaaaccccgtctctactgaaaatacaaataattagttgggtgtggctgtgggcacttgtaatcccagctactcaggaggctgaaccaggggaatcactattattaatcttaaaaaattattattattattttttttttgagatggagtctcactctatcgcccaggcaggagtgcagtggtgccatctctgctcactgcaagctccacctcccgggttcttgccattcacctgcattagcctcccgagtagctgggactacaggcacctgccaccatgcctggctaatttttttgtattttcagtagagacggggtttcaccgttttagccaggatggtctctatctcctgacctcgtgatccgcccgcctcagtctcccaaagtgctggtattacaggcgtgagccaccatgcccagcctaataaaaatttttttatttctattgtatccaatagcttgttttaagtgtgtagaacaataacttacacttttatgttaattttatattttgttaatttactgactgtattattagtttagacaaatttcaatgtactgtggttttttatgtgtaagattatatgttcctcaaacagcaactttttacttatttgtcttcagtttcaatggctttaaaaagaattcttttttcattattctgccacatgcttccagtgctatgttaaaatagaaacattgacaaagggcacaatagagtttactattggtgtctgtgaatttgaaatggcaaacaactccttaagtttttataagctgatttcaggaggtaaagatcttcttttcttgtgttccccagggttttgggatgccctctgggtttgtagtggagtggggttgtaacttggttgcaaggctgctggttctacattagggtccatatttagttgtcatgttacaagaggcttgggtagttgtacttcccaatttttttttttttttttttttttttttttgagacaggagtctcgctctgtcgcctggctggagtgcagtggtgtgatctcagctcatcaaaacttttgcctccctagttcaagcgattctcctacctcagcctcctgagtagctgggattacaggtgcccaccagcacgcccagctaattttttgtgtgtttttagtggagacggggtttcaccatgttggctaagctgggtctcgaactcctgacctcaggtgatccacccgccttggcctcctgggtgctgggattacagacgtgagccaccacccccggccacttgtttcttttaaatgcttattaaaagtttctcatcagaatattttatttataattatactgcatattctctgaaattttactgccaatttttcaaaatacctgcttttgatgagtacagttacagtcaaatactgtagttagacaaattcttttttaatggtatattaatgttgcataccaaattgtatgagttaaacgtctcttcctgtgcagtttcatattagtggtgttttcagtgtaggtatcttaatatcagcttatcgtggtttttggttatgtattataattttagtcaatttgcaattctgtctgtatactttatgtcaatgtgaggttgaattaaaagatagccatatgtctatcacaatcatatatgtgtgtgtgtttatctataaatatgaccccaatattggttatggcttatcttgtatatattctttctttctttctttttttttttttttttttaaggtggagtctcgctctgtcgcccaggctggagtgtgcagtggaacaatctcggctcactgcaacctcctcctcccgggttcacgtcattctcctgcctcagcctcccaagtagctgggactacaggcgcctgcaaccacgcctggctaattttttgtatttttagcagagacggggtttcaccatattagccaggatggtctcgatctcctgacctcgtgatctgcctgcctcagcctcccaaagtgctgggatcagagatgtgagccactgcaccctgcctcttgtatatattctttcttagctggttttcagtggttgttttatcttgtctaaatgtgtagtcatgtaaatattttcaccatttcttattttcatgatgtgtttaatcatgaatatatattccctttgtgtaagagaaacacttctgggatttgaaggtaatttttgaaaagatttataattctttatttttttcagtttttctgttagaaaattaattgttgtaaaaacacataaaatttagcatcttaaatctatttaagtgtacatttcatggcccaacatgtgggtggctcacatctgtaatttcagaaatttgggagtccaaaacaggaagatcacttgagcccaaaagtgtcagaccagcctgggcaacatatgaagagtctctctttacaaaaattttttaaaaatagccaggcgtggtggtatgcacctgtggttccagctacttgggagattgagaggggaggattacttgagcctggaagtttgaggctgaagtgacccttaattgtgccacttcatgtcagcttgggtgacagagtgagaccctgtctcaaaaagaagctgtatatttcaggcatgttaagtatattcacattgttatgcaaaagacttctaaaagttttacatcttgtgaaactaaaacccagtacccattaagtaacaacaacgcatttaccctcttcccagcccttggcaaacacccttccaatttctgtttttataagtgtgactacttaagatatataagcggaatcatacagtattcatcattttgtttctggcatataggtgacataatatttgcaaagtttatcttaaaatgtgacaatattttcttctttaagactgaataatatttcattgtgtgtatatatatatatatatatatatatatatatgcaacacttttgatgtgtttataaatcaagagacatctgagttgtttcagccctttggcttttgtgaatacgggtacaataaacatggatgttctaataggtcttccaggtcttctgttgcatattttgactataaattcataaatgggattgctgtatttgatgataattccatttttaattatttgagaaacataacattttaaaataatgattgtatctttgttttctactaacaatcaacataggtttcatttttattgcatcatcaacatatttggtgtgcttaaaattttatagtggccattgtaatgggtgtgaggcaattttttcattgttattttcgtgtgtttctctacaaagtattaattttctgtgtcatttcaaatgctctttttctatatgtgtatcttttctgatgaaaattttgttcaattatttgctcatctataaattaatttagctttattgttcagttttaagagttcatatgttatgaatattaactactatcacatatgatttttgaattttcttaatgtgcggaaattttcaagtatagtgtagttacatttttctgtttttttctttgttgttcatgcatttaatatcatatctaagaaaatggtgccaagactcatattatttcttttttctaagagatttattactttttcatgtctaagtttttttgtttttgtttttgtttttgttttttgagatggagtttcactcttgttgcctaggctggagtgcaatgggatgatgttgggtcacggcaacttctgtcttccaagttcaagcagttctcctccctcagcctcccaagtagctgggattacaggcatgcatcaccatacccagctaattttgtattttttgtagagacggtttctccatgttggtcaggctggtctggaactcctgacctcaggtgatccacctgccttggcctcccaaagtgctaggattacagacatgagccaccacccctggcctcatgtctacggaatttttttgtaaattttgtgaatatagtttttaaaaatgatgtaactgtatttcatcagtgttgatgtttttaacattattttttgagaaaattatcttttctgtatcgtgtgctcatggcaactttgcaaaagatcatgtaatcatatacagaaggcttcatttctgggctctctgttctgttctttcatctttttatctttgtgtaagtatcacactttttgttattgtagcttttaatgtgttttgaaatcagaaagtataatgtctctctgttcttttttatgagtgttttgctagttatagtttataatcaaattataaaatgttaagcaggttgggtgcgctgtctcacacctgtaatcccaacagtttgggaggctgaggcgagcagattgcctgagctcaggagtttgcaaccagcctgggcaacaaagtgaaaccccgtctctactaaaatacaaaaaattagcagggtgtggtggcgtgcgcctgtagtcccagctacttgggaggctgaggtgggagaattgcttgaacccaggaggcagaggttgcagtgagctgagatccctccactgcactccagcctgggtgacagagtgagactccatctcaaaaaaaaaaaaagttaatgtttttgcaataaaactgtgctattgtaattttttttttttttgagatggagttttgctctttcacccaagcaagagtacagtggctgaatctcagcttactgtatcctctgccttttggtttcaggcaattctcctccctcaatctcacattgcattaaatctgtagattacattgagcattatggacatcttcaaaatatttcaaattttgaacaggagcatgctgaagagtgtgttgtttaatttctatgtatttgtacattttttttctctatcttatactgccgagaccagctcagtcggggagaccctaacccaacggtgctagaggaattaaagacacacacacacagaaatatagaggtgtgaagtgggaaatcagaaaaggtttggagctgagagccccaaacagagatttacccacatatttattaacagcaagccagtcattagcattgtttctataaaagattaactaaaagtatcccttatgggaaatggagggatgggccaaaataaagggatgggttgggctagttatctgcagcaggagcatgtccttaaggcacagatggctcctgctattgtttatggtttaagaatgcctttaagtggtcttccaccctgggtgggccaggtattccttgccctcattccggtaaaccgacagccttccagcatgggtgttatggccatcatgaacatgtcacagtgctgcagagatttagtttatggccagttttggggccagtttatggccagattttggggggcctgttcccaacatgtctcttctttgatttgcaaatcaataaaggcaaaggcagctttgtcacggtgagctacttctcgcaggagtcaggatccacatctgcagactatcagcacagattaaaagcacaatcatctttgaaatcacagaacttccaagtgtttttatccattttaatgggttactagctgctaatctgtctgcagctccattaagcactccagttcttggcattaacatcaggtgtgcttgggatgctttaaatattttaattttgcaatatccaaaaacaactttgtagagtgtctttctagatgcttttttattctttcccaaattttgatcttattaagaactattaatagtgtccacaaatccttgtgtttagctcctacagcaggccttatcatttgaggtcgaggtgccactatactgccatggttccagataatagaactcttgccatacttcttatcatttctatcatctgaccattttgttcagatcagctgaacacagtgtggctgtggcacacagactgagaggtgcaatttaagctaaacatccccttaggagaccagctaataatgattccatgggaatcattgtgcagcacctctgcctgttctgcaatgcaatctttctaaagaagtacattcattttttctggccaggtactattttgtttacaaataggtttttgagggcggtatgcctcaattataggagcagatttattatggtaaatactgagataagaaagcatgtgtaactgtgtcatagagtgattacatccaggcattattaccagccaagatagataaatatgcccaataagtataattgttctctgtgtcagcccttgttgaaggaatactcatggcaatggtgataactgctatcatagctaccattaaattgctcattgtgactggttgtcccactttcttcaggttttcttccgccatctgtgacagcttcttgatctgtcccaaggtgggtggctgtgttcgacgtgtgttgcttgtgacgcttggggttgtcctcagcatcaatcttgacatggctgcaacgagggggtcctcgggatcctcccagaatctcttcctcagcatctggctcatgataaagtttcaggtatcttgatggtatccaaatcagctgttgattttggcctggaggaacacaagcataatctctaccccaagttattttacccatttgccaactttttgttattggatctctccaccaaatcagttgttctgcttctctctttgcagctggtttctgtacatgctgttcagctgctgataacatctggcctttgggcaggctcaaaaaatttaaagttaataatgctagattcaggagcatctgtggggttacatattgtctatttccccccgtctccttctgcaactgctgttttagggagagattcattctttccactatggcttgtccttgagaattgtatgggataccggtaatgtgtttaatattccacacagagaaaaatgtagctagagcttggctagtatagcctggggcattatctgttttaatagaagctggaatgcccaccaccacaaaacactgcaaaaggtgatgtttaactaacacaggcagaagactctcctgattggcatgtagcccagacaaagtaagaaaaggtgtccacacatacatgtatataagctagtctcccaaatgagggaacatgtgtgacatccatttgccaaatagagttaggttccaatcctcgaggattaacccctcctgtaaaagatgaggaatgtaccatttggcaagttgggcattgctggataatagctttagcttctttccaggtaatgctgtatctgcatttgagactagaggcattaacatgggttaaattgtgaaagtgtctagcattagatattgcgttagcaactaggcaatcggccatttgattcccttcagtcaaaggtcctggaagaggtgtatgagcgagccctaatgtgagtgatgtaaaaaggatgcattgtactcctaactgctatttgcaattgggtaaataaagtgatcagttgttcatctgtatgaaatcgtaactgagcattttcaataaactgtgtggaatgaaccacgtgtgaagaatcagaaatcacattaataggcatatcaaaagcagtcaatacctcaattgcagctacaagttctgctttttgagctgaagtatagggcgtctggaaaactttacttttccagccagaataagaagctttaccattactaaacccatctgtaaaaacatactcagcaccttcaattggtttacatttagttattttagggagaatccaattagttaatttcaaaaactgaaacagttttgttttaggaaaatgattatcgagaatgcccacaaagtcatctaaatgggtttgccaagtaagactatttataaaagcttgctgtatttgtaccttcgtgagagagacaataacttttccaggatcatatctgtgtaatttaacaatccgagttctcccaatccctatcacagtagcgatttgatttaaataaggagttagagtccatgaattagtatgtggaagaaaaagccactctactaagtcctgttcttggacaataacaccagtaggtgaatgctgagttgaaaaaattagcaaatctagagtcttctctgggtctattctatttatttgagctttatggacttgcttctcaattagttgtaactctccctcagcctcctttgttaattgctgagggctagtgagactaggatttcctctaaggatagaaaacagattactcatggcataggtaggaatgcctagagcagattgtatccaattaatgccccctagtaatttttgaaagtcatttaatgttttcaattgatccctacatattgttcctttctgtggcacaatggtagtgtcatttactagggtccccaagtaggagtagggagtagtagtctgaattttgtcaggagccataagtaaaccagtgcaagaaatcaaattttgcaagggatcataacattggagtaatatttctcaagtggcggcagcacaaagtatatcaaccatataatgaataatgtaacactgtgaaaatattttatgagtaggtcaattacttgccctacatatgtatggcaaattgttggactgtttaacatgccttgtggcaacattttccaatgaaaacgcttagcaggctgctaagcgttgttgtttactgcaggaattgtaaatgcaaaccattcacagtcttgctcagataaagggatagtaaagaaacagtcttttaaatctatgactattaaaggccaattttttggaattatagcaggagaaggcaatcctggttgtaatgctcccataggttgtataactgaattgatggctcttaagtcagttaacattctccatttacctgattttttcttaattatgaaaactggagaattccaagaggaaaatgttggagctatgtgcccattttctaattgttcagtaactaatttctctaaagcctccagtttctctttatttagcagccattgttctatccaaattggcttatctgttaaccattttaaaggtataggttctggaggcttaacaatggctgccatcaaaaatgatatcctaatctttggcgggaactctgtttttccgctggaagtggttttttcaaaccttgcacattttttttctagtaccataccagggacataccccatttcatgcattgtatgttctttgagggctatataattgttctggaattagaacttgtgctccccattgttgtaataaatctcttccccataaatttataggtacagaagttataattggttgaatagtcccaggttgtccatcgggcccttcacaatgtaaaatataactacttcgatatacttcaggggctttaccaactccaactatattaaattgagtgggttgaattggtcacgcggatggccaatgctgtagagaaaagattgaaatgttgactcctgtatctaccaaacctttaaatttctttccctgaatagttatgtcacaggtaggacgtttactagtgatttgatttacccaataagctactttgccttgtttatttgtgcttccaaatcctcctgttcgtttaatttcactttttcccattcccacttatggcacaatcaggagctgtgctatgcgctctcctggctctgctttccagggaacagaagtagatataacaatttgaatttccccattgtagtcttgaatcagtgactcctgtatatatttgtaccccttttaaacttaaactagaacttcctagagctaactcctattgtccctgctggcaagggtccacagactgctgttgggaactttagcgggggttcccaaggcagaaggctcacaggttttgcagcataagtctactgtggcactaccagctgtggcgggggacagacattgtacaggggtgagggaatggcctgagctggaaatgccccagtttagaacggggcctgagacaggcccctcatggcatttcccaaaatcaggttcccatctttatcaaacagagtggcactgattagcccaatgttttccttttttacattttggacatatttcagactcagtagttttcttttttcccctatctggtggcctgacttgctgattttttctacattcttttttagtatgaccatgcttcccacagttaaaacaagctccaggaaatggagtatttcctttatccactctcagtcttgtcgttgcctgtgctagcagagtagccttacgcagattacctccaataccatcaaaggcctggatataatcaactaaatgtgctttccctctgataggtcacacagcagcctggcaatcgggattagcattgttgaaagctagtaactgcaacactatatcctgagcagccgaatctgtaatcacctttttaagagactcctgtaaccaagctgtaaaatccatatacggttcttttggtccctgttttatagcactaaaggaagggtattattctccacatgaagtggtcttttcccaagctgtaatacacactcctgtaagctattctgtggcatcatcctgcatgaccagttgtgcatctaaaccagcccagccgccaacccccaaaagttggtctgagttatattaatttgaggatgggcctgggtattgcgagcagcctgaatggaagcttcatctgcccaccaagttttaaattgtaagaactgggcaggagttagacaagctcaagtaagagcatcccagttagtaggaatcatcagactggaaacggcaacattctttaagagtcttattacaaaaggagaacctagtccatactgattaatagcttgtttaaattctttgagtaatttaaaaggaaaaggctcaaatgtagctataatatttcaccattgatctggggagtgtattctaacaaggaactgccaagcctctatatcactctctcgtctagcttgctgaattcctgcctgaatggaactaagagcagttgctcgaggcactgctcgaacagtcactggggcaactacttttcacccagtgtcctctggaaaagaaagatctggagggtcaggccactctttttcttcaaaataataatgagggggtgtagaagggtagggatgaacctctccctcctgtgcctctttagctttcactggcaaataaacctgatatgtaacctcttctgttacttcattacactctccttcctcctcattatcagtgtgaaaaagttccaaggtggaatgaaccacagcacacacttgtcccattgttaccctgatgcttccaagctccccttcttactcatcatggggattgctttaagagtacttgggtgtcctccggcttagttctacattctccaaccatcactccactgaccttcaacctggattcgagcccccatgatggacgccacttgctgagaccacctcggtcagggagaccctaacccagcggcactagaggaattaaagacacacacacagaaatatagaggtgtgaagtgggaaatcaggggcctcagccttcagagctgagatccctgaacagagatttacccacgtatttattaacagcaagccagtcattagcactgtttctagagatattagattaactgaaagtatcccttatgggaaacgaagggatgagccaaaataaagggatgggttgggctagttatctgcagcaggagcatgcttttttttgtggtttaagaatgcctttatgcagttttccttcctgggtgggccaggtgttccttgccctcattctggtaaacccacaacctcccagcgtgggcgttatggccatcatgaacatgttacagtgctgcagagattttctttatggccagttttggggccactttttggccagattttggggggcctgttcccaacatgtaagctcagtgctttgctgagttctctgagtaatctttcaaattattcaaattattgaacttgaggaggaagatgtggaagaccttggcttgttagcagtagttcagaaatagatggttatccagagccatgtgactggcatctgtagttgcgacagtgttgtgggactgagccctgaacttgtggattctgtgttgactctgggtggtgtcagaattgagttgttggacagccagttggtgttggataattgattggtgttcagcaaactacaactttttttgtcagacgagatctaccacaggggccttgtattagggttctctagagggacaaaactaataggatagatatatatgtataaaggggagtttatttagttttaactcacatgatcacaaggtcccacaacaggccgtctgcaagctgaggagcaaagagagtcagtctgagtcccaaaactgaagaacttggagtctgatgtttgagggaaggaagaatccagcacgggagaaagatgaaggctaggccaatgtaaccttttcacattttcctgcctgcttttgtatgctggttgtgctggcagctgactagatggtgcccacccagattaagggtgggtctgccttttccagcccactgactcaaatgttaatctcccttggcaacactcaaagatacacccaggatcaatactttgcatccttcaatcaagttgacagtattaaccatcataggcctgggctggagggagacttcagatgtctgagggaagtgagggtttattctgcacacaggctgtcacattgtacattgtcctgctattctgggtctcctagggtgagagggaagagagagtaaaaatgttctgagaacttattccctctccccactttggtgccaacccccacatgattctgacccactcttgaccatacccactaaaaattgacacggccactcctctcccaggacaaggttttaccctcaggaattatgcccacaatagctttgcccctagagttttctgccaagaatatacacaggtgcctagaagacttctggcttatctcaaccccagacactgaatctgtagcaggaacctgtctccttcaccaacacaggcttctggacctcctgattataatctcttctgcctgtacagacacaaagttttctgaaacaaagagatttactaatgttaatttattgttctatttgattcttgtatctttgtcccacattttctgtctctttgtgtcttctttatttttattttatatgcttttacttcttccttattttgttttgtgtatctatatagatgtattctttgtgctaagaaatttatttttgtgtatgtgcatatctttcccagaaaataatgtattttaatatgattatatgttgttttgttgagtcttgttatttacattggaagcaactgccttcagcgccttttatatataaggcagtgccaatatacttctttagaattcatttatttttgaagtttttttttctttttatttagcaggacagattttgtgatggtattatactcacttgattatatatatatatatatatatatatatatatattttttttttttttttttttttttttttttttcagaactttgactatatcacacaatatccttctggcctgcaaaatttttcttgagaatccacttgctatctcataagagtattcttgcaaataacactttttttttttttttttgagacgaagttttgctattgttgcccaggctaagtgcaatggtgtgatctcagctcactgcaacccctgcctcctttgttcaggcaattctcctgcctcagccccccgagtggctgggattacaggcaggcaccatcacacagcaaagtttgtatttttagtagagatgggttcccccatgttggtcaggctggtcttgaactcccgacctcaggttgttggcatgccttggcctcccaaagtgctgggattacaggcatgagctgctgcacccagccaacacatcacttttatgttgcagctcccaagattcccttttctgtgacttttacaattttgcttacatatgtgtttgatataaatatctttgcttgtatcctagtttgtttgttgagcttttttatttttacatcatttttcaagatttttcagggtttttttatatttttttacctccctaatttgtttactaatgttttaaatatttttgttcttatttccagttttctgattttctgtagttctctgtgttcatatttcactcattgagtgttactgaatttatttcattttttattgtttcttcctcaaatttttattttattttatttttgagatagagttttgcacttgttgcccaggctggggtgcaatggcatgatctccacccaccacaacttccacctcccaggttcaagcaattctcctgcctcagactcccaagtagatgggattacaggtgcctgccaccatgccagactaattttgtatttttagtagagacagggtttctccatgttgatcaggctggtgtcaaactcgtgacctcaggtgatccacccacctcagcctcccaaagtgtgggattacaggtgtgagctactgcacctggccacattgtaatcttttataaaaatttgaacattaaaaagttacctgtcacaatctttgtaatatggctttctcctggcatactttgaacaattgtctgagttagagattctgagagtctctcaaacatgttctttgagtgtgtcttgtctgaaattttgtgtttattttttagttaaaggaaattattcatctttttttttggagatggagtctcagtctgtcatgaggcaggagtgcagtggcacgatctcagttcactgcaacctccgcctcccagattcaagcaattctcctgccacagcctcctgaatagctaggactacagataagtgccaccatgcccagctaagttttgtattttcagtagagatggggtttcaccattttggccagcatagtcttaatctcttgaactcgtgatccacccgcctaggcctcgcaaagtgctgggattatgtgcatgagccactgcacctggcccctagtcatcttttttcttaatactcagtaatcacttgctacacctgttttctttctgtggcactgcagtctctctactgctgtaacatttacctttggtctcagcagactcaaactgtcattccaaagtataccaccatttctttctgcactatatatcatagaagacagaagccagtgtgtggaaaggcctggacaagcaagtaataaagaaatttgagccagtattttactagtctttttttttttttaacaaaatcaaaagttggcaagttacttctttatttatttatttatttatttatttatttatttatttttataattttttttttttgagatgtattctcactctgttccccaggctgtagtgcaatggtgcaatcttggttcactggtaccttagcctcccaagtagctgaggttacagcttgagccactgcacttggctgggaatttacttctaaaggcattatgttatattgggaagcaggaatagccatgttgggtaaatgtaacaaacatttgcttttcccttctgtgtgactttgtgctcacctggggtacttcaaacacttaactcatttataattttttctcagatatattttggttagtatgttttcattacatataaagaattagagcctttggtattttgctatgctatctggtttatgcagtttgtataatattatagtttagatttgtaatctatatttatctgagtctagtaagtggagtaatttgatatttttatttctttcagttatatgttctcattttgctgaagacttttgcccagggccaggcattaaagattcttttcaaaaagtgatactgagagaatatgtaaaatgtggacataaggatttacagttaagaaaaggatgtaaaagtatgaatgagtgtaatgtgcacaaagaaggttataatgaactaaaccagtatttgacaactacccagagcaaaatatttcaatgtgataaatatgtgaaagtctttcataaacttttaaattcaaatagacataacacaaaacatactggaaagaaacctttcaaatgtaaaaaatgtggcaaatcattttgcatgcttttacacctatgtcagcataaaagaattcatattagagagaattcttaccgatgtgaagaatgtggcaaagcctttatctggttttcaacccttactagacacaggagagttcatactggagagaaatcctacaaatatgaatgtggcaaatcttttaaccaggactcaaaccttactacacataagagaattcatactggacagaaaccctacaaatgtgaagaatgtggcacatctttctaccaattctcataccttactaggcataagctaattcatactagagagaaaccctataaatgtgaacaatatggcaaaacttttaaccaatcttcaacccttactggacataagataattcataatggagaaaaaccctataaatgtgaagaatgtggcaaagcctttagtattttctcaacccctactaaacataagataattcacactgaagagaaatcccacagatgtgaagaatattgcaaagcttataaggagtcctcacaccttactacacataaaagaattcatactggagagaaaccctacaaatgtgaagaatgtggcaaagcctttagtattttctcaacccttactaaacataagataattcacactgaagagaaatcccacagatgtgaagaatgtggcaaagcttataaggagtcttcacaccttactacacataaaagaattcatactggagagaaaccctacaaatgtgaagaatgtggcaaaacctttagtgtattctcaattcttactaaacataaaataattcatacagaagagaaaccctacaaatgtgaagaatgtggcaaagcttttaaacgatcttcaacccttactaaacataggataattcatactgaagagaaaccctacaaatgtgaagaatgtggcaaagcttttaaccaatcttcaacccttagtatacataaaataattcatactggagaaaaaccctacaaatgtgaagaatgtggcaaagcttttaaacgatcttcaacccttactatacataaaatgattcacactggagaaaaaccctacaaatgtgaagaatgtggcaaagcttttaatcggtcctcacaccttactacacataagagaattcatactggacacaaaccctacaaatgtaaagaatgtggcaaatcctttagtgtattctcaacccttactaaacacaagataattcatactgataagaaaccctacaaatgtgaagaatgtggcaaagcttttaaccgatcttcaatccttagtatacataagaaaattcatactggagaaaaaccctacaaatgtgaagaatgtggcaaagcttttaagcggtcctcacacctcgctgggcacaagcaaattcatagtgtacaaaaaccctacaaatgtgaagaatgtggcaaagcctttagtatattctcaacccttactaaacataagataattcatactgaagagaaaccctacaaatgtgaaaaatgtggcaaaactttctaccgattctcaaaccttaatacgcataagataattcatactggagagaaaccttgcaaatgtgaagaatgtggcaaagcttttaaccattcctcaaaccttattaaacataagctaattcatactggagacaaaccctacaaatgtgaagcatgtggcaaagcttttaggcggtcttcacatcttagtagacataagataattcatattggaattcatactgaagagactgtacaaaagtgaagaatgtggcaaaggcctttactgctcctattcccttactaaagaatgtggcaaagcttttcaccagtactttacccttaatacacataagataattaatgctggagagaaaccctacaaatgtgaagaatgtggcaaagatttctattgattctcataccttactaaatataagataattcatattggagagaaattctacagatgtgaagaatgtggcaaaggctttaattagttctcatcccttactaaacataagagaattcataccatagagaaatcctacaaatatgaagaatgtgacaaagcttttaaccacttctcaaccctgcctacacgtaagataattcatactggaaggaaaccctacaaatatgaggaatgtctcaaagctttttactgattcttataccttactaaacataaaataattcataaaggagataaattatacaaatgtgaagaatgtggcaaagcttttaacaaatcctcatccattagtaaacataagataattcatactggagagaaaacctacaaatgtgaggaatgtggcaaagcctttagcctgtccctccaatttactgcacataagataatttatactggagagaagccctacaaatgtgaaaaatgtggcaaaccttttaaccaatcctcaacccttactacacattagataattcatgctggagagaaaccctacaaatgtgaaaaatgtggcaaagcttttaaccaattttcaaaccttactaaacataagataactcatactggagaaaaatcttacaaatgtgaagaatgtggcaaagcctttatccagtcctcaactcctagtaaacataattaatgatggagagaaaccatacaactgtgaagaatgtggcaaagcttttaaccagtcctcaaactttattgaacaaaataattcatacaggagagaaaccctacaaatgtgaagaatgtgacaaagcctttaaccagtcctcaatttttactaaacataagaaaattcatactggagagaaaccctatgattgtgaaaaatatggcaaaggctttaactagtcctcagttcttaacacacatacgataattcttactgcagagaaactctacaaaccagtaagatgtgacagtgcttctgacaacatctcaaacttttctaatcataaaagaaatcatattggtgagaaatcctagaaatgtggagaatgtaacaaagtatttaaatggttgtcacacttgattataggtaatattcatattggaaaaatttcctacaagtaagaacaatgtggcaaagtttttaactaatacaccttattgcacagaaaatcatttatatttgagaaaaattgtagaaatatagactgtgaaaaagacgtcaatatctgctcacatcttactaaacaccagagagttcatgcttaataaaagcatgataagtgcaattactgccaaaagatctttcagaaaatattatcctttaaagtgaaggagagtatttatattaaagatgaacattacaaccataaagagggttgaagtacctttacttgtatcagatcttattgtccacattttgtactacagaaaaactctgaagaggtcactcaaactttgttcaacatcagggaatttatattggagagctgtcttgcaaatgtaataaatttgggaaaacaaattttcaaaaactacagcttagaaaacaccagagtttatacgaaaatatattttcaaaggtgtagtaaaaataaaaaaaattttaatccaaatttgtctatgtaaataccagaatttatagtagaaatatatgaggaagcgacacttcgaatattctactaaatgagagttctgagtatagaaaataaaactaaagttggtagaaaaattatttgtatataatgttaagaggagtaaaagattttttgtagaataataactatattcggattatactttgtttcttgaaaaaattacagattttttgaaaagcaaatgatgtaactcaactcattattttctgctgtttcttcattcttattcacttgtgaaagcttgtgatcatttgttgctgcatcagaggtatgagagattcttcttcattagatgggcattatttatgatcttttctatggatgagtaagaatattaaaatgtaagatgcatggtgaaaatctaagtggagaggttctttgtggttaacttatactattgagtgatgcacaaggtaggtgttaagagtaatattcttttgcattatgagaaaactagtatattattcatatattttactaattgtactttttttattatactttaagttttagggtacatgtgcacaatgtgcaggttagttacatatgtatacatgtgccatgctggtgcgctgcacccactaactcgtcatctagcattaggtatatctcccaatgctatccgtcccccctccccccaattgtacttttatataataaaatgcagtacattttaaaaaattttaaattctgtgtgaaggtaactgtttcaacatttttaacatggtaaatattattgtgcattcaataaagtgttgttatgccacaaagattaacattttccaccttaccaaatggcatacgtaaaagatggtaacaatatactatttggtaacatcatggactaacatctgtagtcatctcttttgccagtggcttcgaactgcaaataagttaaagaatattgttcttataggttaaatttttatttttattttaatcatttaaatttatttttcttaatttttgtgggtacatgagtttatatacttatgccatatatggcatattttgatacacaaatacaatatgtaataatcacattgggatacgtgtggtatccatcacctctagcacttatttctttgtattaaaaacaacccaattctacacttttacttattttaacatgtacaattatggccaggtgtggtggctcatgcctgtatcccaccactttgggaggccgaggcaggtggatcaccaggtcaggagttcaagaccagcctggccaacatagtgaaaccctgtctccgctaaaaatacaaacaattagctgggtgtggtggcaggcacctgtaatccaagctacttaagaggctgaggcaggagaatcaagggaacctgaaaggtggaggttgcagtgagccaagatcatgccagtgtactccagcccaggtgacagtgtgaggctctgtctcaggaaaaaatatatatatacaattgttattgcctactggtttatttttatggttataataaaaattattttaaaatgtgcagttatggttgggtgcagtggctcacgcctgtaatcccagaacttttgggaggcccaggcgaatgaatcacctgagcttaggagttcgagatggccaggaacctgggaggtagaggttgcaatgatctgagatcgtgccactgcactccagcccaggcgacattacaagacttcgtctcacgaaaaaaaaaaaaaaaatgaacagttaaactgtaattgactaatgggttatttttatggttataaaagaaatcatatacaagtataaataaaatacatacacttctgagtcctgagtagatatcttaaaattttatacatatatatatatttgaacatgtgtcctgtctgcatggaaacacataccgacttaatttgggttaaatatacattactctaaaagataaactttaggcgtaaggaaattataaagtaagtgagtttgtgtgagtagaagtttgtacttattttcagaagaaatattggggaaaaattattttaacaaggtgactagtataaaactaaaagcctcaaaaatgctgaaagcaaatgtatactctgctttgtattgaatttattactagagttattgtatatgaaagtgtttcttaattttcattttgagatagttgttaaggcataggaatgctactgactttgatgttgcttttgtattttgaaagtttaataaatttgtttagtaaaatcttaggcttttcttttttctttttttttttttctttttgagattgagtctctcttgtcactcaggctggagtgcagtggcatgatcttggctcactgcaacctctacttcttaggttcaagcaatcctcctgcctcagcctcacaagtagctgggattacaggtattgtgccaccaggcctggctaattttttactttttttttttttttctatttttagttgagactgggtttcaccatgttggccaggctggtcttgatctcctgacctcaggtgatccacctgccgcaacctcccaaagtagtggcattacaggcgtgagccactgcgcccagccagtcttacttaggtttttctatacttcagattatgcatagggataaaagataattatacaggaataattaacttccatttgtcctatctggatgcttttgattttattccctaattcctttgtcttggatttgtactatgtttagcaagactgactttagtaaggatgagtgggcatccttgccttatactagctcttagagtaaaatcttgcaaggtatccctgtttaatatgttgttagctgtgtattttttgctaatatgtgacatttattggctgaggtgccaataatttgatctataattagtttttcagagattatcataagggaatgtcaaattttgtcaaacttccattgtgcatctattcttttgtactctgcatctatttacatgttagagatgtaaaatcacaactaattttacatatatacaaaaaatcatcagagactactatgaacatctttatgcatgcaaactagaaaatttggagaaaatgaataaactcctggatacacaaaactttccaagattgaaccaggaagaaacagaagtctagaatgggcaaaaatgtataaaacatatgatgaaattaaattagtaacaaacctaccaactgtaaaagccctggattatgtaaaatcacagccaaattttaccacatatacaaagatgggcttgtactactactgaatatactccaagaaatccaggtgggattccaccctaactcataatatcaatattatcttaattccaaaatatagtgaaggcacaacaaaaaaaggaaactgcaggccaatatttttggtaaacattgaaacaaaaatcctccatgaaatacgagcaatctgagttcataagcaaatcagaacgttagaataaaaataagacaagaatatccagtctaacactcctattcaacataattctagaagtcctagtcagagctatccaacaaaataaagaaattaaaagcatctaaatagaaaaaaaggaagttaaattatcttcacgatgatataatgctctacctaggaaaccttaaaaatttccagaaatattttaattttaaaatgtaaattatgactgtttaccttcatttctgtgcattttttggttaatattatggctgattgacaacatgttttaagaaaacttcttggaccaaagccattactttattaacgtaatttgagacaaaatagcaatgaaagtcaacattgatgagtgaaacagttacgatctagtccctgataatcatttcctctcccacccaacatgcaagcaccatctttgtgtcatctctcccagttctaagtgttgcaggatgcagaggactagagagaccagtatcggtgaatacaggagcatatttattttaaggtaggcaccagctcagtggattcacatccaaacttaaaaagcaaagactgagctcaaagactgagcaaacatacagaagcaaaacaaaggcagttaactatataatgacaggtcacgtaatttatagcataactgatgacttggcataacttgtggcttggcatagctggtagccgtggagctgcgttgaaagaaaaaagaactggctaatatagacatttgtttgtttgtttgtgtccttcacccttgcttcggaggggactgtctggagcctatttctttggttttgccttcttgaacaaggttatcttctaattttccttgaagtgagattgctaggcagaggaaaacttttctttttaacccctgccttgccacattctgggctttggcttttacttttcttggagttaatgaatgcagtacttattattttaaatttctgcctcagtttctcccctttgatgctttttataaacaaaattttaatagaaagcatcactattacttgattcattaagagacagcaggttttcttctttaggaacaggttgatatttatgcagagcattaggtgagtggtagtttgcctagctacaattgtctctatagttgattgaatgctcctaataaggaaggattaaaggcaaggaagtatcaaacaacctcctagtatggttagaactagtccttttaaggttttgaatccatcaaaggaggaaaaccagcctccaaagagggaatcaggagtccaccctttccaggtctggactgaaatatgggctaattttttcattcttgcagttatttctacaaagctttctcattgttatcaatttttaagcagcaattagttagattaaacttttcacatattccttcttcctgggctaggagatagtctaaagccaggctattttgataaacggcctttctcatttttgtgggctgctgggcaaagaagtctaatgcatttgttgtttcattagtgataatttcaaggactgcctgcaaccttatgatgcagttaagcatgtaaattgaggtgcagtacccccatgacccattttgtgcctaggtagctggcccacattattgaatccttctttcagtggccaatctgtatccttcaaatctcctttttttttttttttgagacagagtctcgctctgtcacctaggttggagtgcagtgccacttggctcactgaaagctccacctcctgggttcacgccattctcttgcctcagcctcccgagtagctgggaccacaggtgcccatcaccatgcctggttaacctttttgtatttttagtagagacggggtttcaccatgttagccagcatagtctcaatctgctgacctcgtgatccacctgcctcagcctcccaaagtgctgggattacaggcatgacccaccatgcctggcccccaatctcctatttgtatgtctttttttatgtttatatttcttttgtttcttcttttaatttcatcatagacaggataccctaaggtttttccttgttgcagtgggagtaaaaagaaatatggcttaattgtcttgaatatacaagcccctatctattttccttgtaactgttggtaggcccatggcccacagatccaatcaagaccagagggtgcttgtcaggtatttggagcttcaagctgataccaggtgtgatttagagaacagaaacaggagaacggatttggatgaggtgatttggagtcatttctgccccgccacaaagtttttcttagtgtttcattataatattgctgttctaagcaggttagttctcttactgggtttgtaaaagcctttccccagcgagcaacacagtatcttccaatgacagaagtttttcagagccagagacttgaacttacaggcattggttcaggggaattgtcagttaaagtaaaattatcttgtggcattaacgtttttgcttttcaaggccactggtctcccatgttcctctgtaaacataacatgaagaaatgcctaggctgccagcaatgttttgagccagctgagcaaacaggttctcagctaaaggaagagactctggtaacttctagtttacatgcttatagaatgatttaaagacttcggattgttgctgagccagacaggtccaggtttcttttttgataacatatagttaggttgctgggtatgtatttatgtagacatgtaagagtaacctgtagtccacatgggtaagtctgactttagaatggtgaagtttacaggattacaggtttttattttgcaatctggttttactggcattttggtaagcataattggcctctgttgtatgctaaggtgccatgatatgcagtaccaacaatccttttttgggatcccagcggaacaaggaggagttactcttggcatgcatatatatttgtagttatttctatagtatttaagggtaagttaccacagacgggtgagtctagtatgctgcctgataggcatccaagtacagagaaacaggcccttggtaaaagggagggaccttggtttggtttaagaggaaattttcctttgacattgcacgaatcttacaccattcaccaggcgaaaatttagagtcagagaatacataaggtttgttattttctgggccacaaattgagcaggtagtctgattataagtacaagttcctaagtgagtccctgtacacttataactatggtacaatagagttttagttataccagtccctgaccaggtagtatgtgtacagtggggacacccttctataggtgcttcttctagcatggttaagggggtaacaacagcaaaacaatatacagcttatttatattcagcaaggacggaagaggtctttatttgggggaggagactgagcacagtgacagaacaataggaaaacagtattacaaggaaaactactacttttaggatttttaaccacatttacttgcttgacaagttcttaagctttggctgtgcatagactagtcagattcctgtgtgtgactagagtagggcttgttgtcttcttatgcttccgccattcatagactggtcagcttccagaatgaccagagcagggcagttgtctttagcagcagcttgctctcgtctcaggatcagccgggttggatgatctgggtcctgctggctggcccacttgtcttgggctgctggttttagccaactgtggtggatccaagacacaacacctgaaactttaacagcagtgggagtggactagattacagtataggacccatcctatatgggtcctagagaagttggattcaactttttaaaccaaacagtctccaggtttaaaggggtgtactgggtctgtcagacttacaggttttttttaatgtaccaagtaatggacactttgcatagctatccgtagagcctgcatttgctttttaaagttaattcccctagttcctggagatcaacttttatttcgcttatgattgggggaggctgaccgaacaaaatttcacagggcaaatacccagtttgtttgctgggggtgcaactgactcagaggacgaccataggcaagacttgattccatcttagatgaatttcctgatattttttaagtagctgcttgagtgtcctgttcatacatttcactttttctaaacttcatggccgataggctgtgtgtaacttccattttatttttaatagtcttgttaaatcttgcactatttcagccacaaatgatgactcattgtttgatcctaaagttaaaggcagtccaaacctggcgataatgtcttttaaaagtactttagttacttttcatgctttttctgtcccggtggggaaagccttaacacatcctgaaaaggtgcaaacaagcactagcacggactggtagtccacagcatggacagttctgttaagtctgtaaccacgcttttacaaggcatggcttctacttcccgaattcctgggggccaagtgggcccctgttgcgggttgttttgagcacaggttaagcactgtttacaaatggctcaagtgatggcagagagccgtggcacatagaaatggcattttagtaacgtttctagtgccattttttccatgagttccttgatgaatttgctttacaaacatatgagcttaaatctttgaaatggctaatctcccatcgaagaatttccaccaccctccttgaatatatttttcagcctcctgggcaaaccagggtctttcatttggtgtataacttgggttttcttggagaggaggttctgggaggagagccatagctaaggcttcctctgatttaaaaaaaaaaaaaaatgcagcgtaattattgctatctgttttgcctctctgtctgcctttttgtttcctttggtttcccgtgttcctgccttttggtgccctctgcagtgtattacagctactttttctggagcccatacagcctttaggagctgtagaatcttttcgttatactttatttttttttctccagctgttgaaagcgttttttatttgcttttttttttttatagctccatgaatatgcagtgtggtaaaatcaaatttaaagccagtgtaaatattgaccttcttatcttttgccaacaacagtgctcttgttagggctattaattttgctttttgagctgatgttttgacattcgggtttctgaggggttggtttataaaatttatccgactggaggataccttatctgtggttttgacgcagttatggagaggagctcccggtgtgatgggaagcagagtagccagatttaggtgtttacttttttttgagacagaatcacactctgtgatctcagctcactacaacctccacctcctgcctcagcctcccaagtagctggggctacaagcacgtgccaccacaccaagctaatttttgcatttttagtagagacggggtttcactatgttgaccaggctggtctcgaactcctgaccttgtgactttccctcctcggcctcccgaagtcctggaattccaggaatgagccaccacacccagcctggatgtttactgtttttaaaataatgtaagagtttttacatagaagcccttagtactgagtcattcttgggtttgataaccaatgatgccctctttgatccattgaagttataactgagtgtggcacctggatggttagctgctgtcccagagttaatttactagcctcttgtgttaacaaaacagtggcagctaaggttttaaagcaagaaggctttcctagcaccacggagtctagttgtttggataaatatgccactgggtgatgctgtgatcctataacttagagtcagaaccccgtagcaatttccttttgttcttgaatatatagaaagaaaggtttacttatatctggtagtcctaaggctggggcctgaattacagcctctttgatttgtttgaatgctatttcctgattagtttcaggggttggaagcgcacaaatggactgctattccttatacctaagctggcattccttgtggcttactatgaaaactagacatttaacctcttcatggcaaatttaggctttctttttaaatacttagtaacctgctttcaataagagatggaggtggtctcgggttttatgataacagtcctctcgggttggggctgccaaaagaaggttgtccatgtactgtaacaaggtgcacttatcatttggcatggtataggccttaaggtctgaggccaacgcttccccaaagattgtgggagagtttttaaacccttgcaggagcctagtccaggtgagctgtgtagcttctttgtcccactgaaatgcaaagataggctgactaactggtgccaagcagatacaaaagaaagcatccttcaagactgtaaaccaggcagtacttgctggaatgagttccattaaagcatacaggttgggtaccactggatggataggtaacatggcttggttcacagcacacaagttctgcactggtctatacttattagaccctggtcctggcagcagtttttgtacaggcaaaagtggaatattgtacggcaactgggactggactaaaatcctatgtttatggagccactctaagtgtttgtaagcgccctgtacagccttttgggggaactgggtactgatgaacccgaacaggagttgctcctggtattaattttactactactgctgcatgatttacagctaacacaggtcggttgtcctcatcccacactccaggaatttctttaactaactgaaataataatttttcttttacatagaagcccttagtactgagtcattcttgggtttgataaccaatgatgccctcattggttatgagggcatatgaggttgcattggtgcttgcgatttatttttataaagtctccactcctcaacctgtgggatggtaagggttaacaccatggcctttgggtgagtcagatttaaagtcatatctccctgtgggccaaaagtaatttgtgcttgcagtttttggagtaggtctttttctaacaagggaactgaacaattttggaggtacagaaaatcatgctggacttctcgtccttctataacacacctctttgaccaacagaacagcctcttctttgagacaccagtagcctctacaatcgttgtatagttcttggatagtggccctatgggtcaagttactacagagtattcagccccagtatctaccataaagtccattaattggcctcccaacttctaatgcaaccataggctcctggaggcccaatgagaaggagcccagtttgtcctagttctcatatcttttagcccctgccagcccgattagatcagtattgcattgctttagggtttggcagcccctcaccgatggcctctctgtcacacggccttagccatttccctcattgccttctggacattcatctttacagtgtcctttctttttgcatcatgcacattgatccttctctaaccttggttggctctcgaatccctgtctaacttgacctcttccaggtccatgtctgcatcctctcacattaatagtttctctctctatgagggctgctgcttatagattgagtttttttttttttttttttttttgagacggattttcgctcttgttgcccaggctggagtgcaatgacatgatcttggctcactgcaacctccgcctctcaggttcaagtgattctcctgcctcagcctcccaagtagctgtgattacaggcatgcaccacaatgcctggctaatttttgtatttttttagtagagacggggttaagccatgttagtcaggctggtctcaaactcccaaactcaggtgatccacccgcctcggcctcccaaagtgctgggattacaggcatgagccaccgtgcccggccttgattggctttttttaaagcctctgttcgacttccttctttgccccctggtcatggttaacatacactttggtggctacttttataagctgggtggcattcatggctgcaaaacctcccagtgtctgaagattttgcttaatattactgtgggcctgtcctacaaatgatgtatttaccatatgctgattttcagcagcctcagggttaaacggggttaaaagctggtatgcctcacagagtccttcataaaactggctagggatcttacttccctgaagcacctctgagatctttcttatattgatagccttttttccaccatcccttagcctttgcataagtgccttttggtacctctgcaaatgctgaagctgagtcgcatcttctgagtcccagttgggattttggtctgggaactggccctgagcatatgcctgagcattttcttttttttttttgagatggagtctcgctctgtcacccaggctagagtgcactggcaccatctcggctcactgcaagctctgcctcccaggttcacaccattctcctgcctcagcctcccaagtagctgggactacaggcacccgccaccacgcccagctaatttttttgtatttttagtagagacaaggtttcaccatgttagccaggatggtctcgatctcctgacctcgtgatccacctgtctcagcctcccaaagtgctgggattacaggcatgagccaccgcagccagcctgcctatttactgcatctgctcgtgcatgggcttctagccagcagagagctgtctaggttactatcctgtgctccttagtgttatacagcatgagaagcagctgcctgcagtctggtcaggttggattctgtgtcagaaagatggactgcatcagatctataagagcttggggcttctccatataggagggagtatggtgtttccagtttaagagatcagtggttgaaaagggctgacagatgaaagtccattcccacccttggacttggccttggttatcttaataaatgggtcctcgtgtctccctgagaggcatttgcatatctcaagcacaaccagatctgagatggcctgcttgactatcttgacttctttccctgacctctcaagtctccagtctttcatttcagggtgagagttggggtgtgctagcacctgaatctggttcccagggggctgctggccttggtaaagtggggtaggctgtgacatatggagtaggaatctttattccctctggtggctcctgcaaaactggcttttcttgctccctctgggccttcttctttaactctgtatctgctagcgaagctgctcttactttcattttttggcttggcttaggccacaagtgttttgcaataagctgctaaacagggctggattcaggctggtcttgtttgtgctagatttaaccatgagtcaatataaggaaactgatctggatgccgaggctgtcctctgacctgtcaccaccttaaatacacggccaattattttcctatctatagttccttcaatcagtcatccaacactaaaagaaggcagttctaattcacagagagttcttaacctctggggggttagcttaactccataattccctgtaaaaccttctttaaagttctgtaacatgcgctccaatggagtggactttgatgactttactcccatttcctccctttactacgcagcacacccactcttccttttgcctcagactgaccagaccatccccaattacgggagttttcagatgctgcttggctttggagaggtccttattcccaccacaactctgagctgtggggcaactcctattggacgtatacagttcaccactagtccagggcagccccatactttgctcggagcacacagtcaatgctaagagatctgtgactccccacgtcactccttgcattgtattctcctggaaccatctttcacacacttttatatacgtccctgttcccagttcctgtgttcctaattggggtggcaagcaactctcaccacctccagtttcctttacctaaccaactaagcaagccactctcgcatcctgtgttggttgaggtgtgagattcttctgaattggcaagcccctcttgccgccccaagcctctctgggtcggactactagttacaccccgggaggtgatcaggctccccttccgtccttacgggacgggtcctgccttggtccccaataacttaccgtggttcctaaagtgcgctatttctggaatcatcctgtagcccttctcaggctccgttgcactgctgggtagggatgccgggtcatgggagagctgatttcccctccgggctgaagttctcccggcggtgcctgggtcccaggtttcccttgaatcaaggctccagccccgattttcccttgaatccggggctccagccccgatttcaaggcaaaggagacagtctctgctcctggctggctcgccaagaaatgtgggacacagaggactagagagaccagtatgagtcaataaaggaggatatttattttaaggtatgctctggctcagtgaattcacatccaaaaagctgagccttgaacaaagactgagtgagattttaataagtaaacttacagaagcaaaacaaaggcagttaattatataatgaccagtttatgtaatttatagcataactgaattcttggcataacttgtggcctttaatagctggtggccttgtagctgcattgaaagaaaaaacaagaactggctaaatacagacgtttgtttttctttgtttccttcacccttgcttcggaggggagtgtctggagcctatttctttggtttcaacttctcaaacagcattatcttataactgtccttgaagtgagcttgctaggcaaagaaaaacttgttcttttcttttcaactcttgccttgccacattctgggctttggcttttacttttcttgaaataaataaatgcagtaattatctcattgagaggcttctgatcaaattgatcagcaagtcaaactctctgcttaatcagcagtaactttattttcactcttcaaaggcattttacctgcctgaaatgcaaaggggcagttcaagtgactgtgctgagctggtcctctccagtgtcagtctattcacattcacacaggtgatcttctggtgtaagggggtgcacttcaacagcattatcacagcaatgtggaacagatgtaacagaataaaagaggaatcactgccttccaggaaaaggagttaatcttattcattttgtgtatgagtacgtggagaataaagttacagagaacgctttacattagtagtgcagtgcagatcctatgcaatcttcttgtttgtcaaacataccctgaatggttttattaagtactatgtttctggatccaccccttatttgattctgataatttctactttatcaatttaaatattcactcaacatcatccagatttctgtccttgatgcttaagtcctcagacataaaatattattgataaaaacatgagcctttattttactacagagcatttctttagcttggaaagccaaatttggtcaaaatgaaatataacaatgaatataaatcattttggaagtgaattcaaattatttaaaatattaaatttgatagatatatgtgtcagaatttttaaaaaatttgaatacataaagctgaaacttgaaaaatatacatacatgcttttaagacaaatcactttaaaagcatgatcatttaagtttttaatttagcagttttggctatgttgaaaatgtaaatatgaaatatcacataaaataatgttaagaaaacaaaacaaagcacaatagtcctgaaggctgttgtgagacctcggttcttagtttcaaaaatttaaacgagacgcaaaaaaatgaggatgcagcatagatagatttatcgcaaagtagaaacactattttaaaagtgcggtgcaaaacacccctgagagaaaagcaattcaggatgggctgcttataagaatgagacagcaaagactggaaatagagagactccatttatcggagtcttacataattatttacaaagagttagaaagtggtgttattagtaagcatgttctgggtggtcctcttggtgcacatacacagtggctgtacatgcttgtttatatgtcacatatctcattagcatatgtcacatatctaattagcatctcattagcaaaaactccactcacgtgtgtgttttttagtattacgatgagtaaaaggtcagaggacaagtaaaatcaaaatgtgcatgctctttatgggggaatatccctactagagagctttgcttgaatgagctgaaacgcaatgcaaatgttggggtttattgtgttgataatatgctatcaccaggaaatcgccatggctgctgcatcctgaggacatggtgaccttcttggctagctagccagcttcaataatacttatcttagtttattttcaactatcaactctgagacaaagatttacctgttatgtcaatattgtcaaaagtgagaaaatgacaattttaaaatcaaacatatttgagcttgatttgggtcactagctgtgtacccaggagaaattattttacatccctggagcttcagtcaatatgtatgcattggtgtatgtttgtttttttggtgtaggtttttgtccgtttacatttttaaagatattttttcctactttatgctgatgttaagctacacaaaacttaccaagagctctattttactacttttttttttttttttttttagtatttattgatcattcttgggtgtttctcagagacggggatttggcagggtcataggacagcagtggagggaaggtcagcagataaacatgtgaacaagggtctgtggttttcctaggcaggggaccctgcggccttccacagtgtttgtgtccctgggtacttgagattagggagtggtgatgactcttaacaagtatgctgccttcaagcatctgtttcacaaagcacatcttgcaccgcccttaatccatttaaccctgagtggacacagcacatgtttcagagagcacggggtggggggtggggggtaaggttatagattaacagcatcccaaggcagaaaaatttttcttagtaccgaacaaaatggagtctcccatgtctacttctttctacacagacacagcaacaatctgatctctctttccttccccacatttcccccttttctattcgacaaaaccgccattgtcatcatggcccgttctcaatgagctgttgggtacacctcctagacggggtggcggccgggcagaggggctcctcacttcccagacggggtggccgggcagaggcacccccccacctccctcctggacggggcggatggctgggcgggggctgccccccacctcccggacggggcggctgccgggcggagacgctcctcacttcccaggcggggcggctgccgggcggaggggctcctcacttctcagacggggcggccaggcagagacgctcctcacctcccagacggggtggcggtcgggcagagacagacactcctcagatcccagacggggttgtggccgggcagaggcgctcctcacatcccagacggggcagcggggcagaggcgctccccacatctcagacgatgggtggctgggcagagacgctcctcacttcctagatgggatggcggccgggaagaggcgctcctcacttcccagactgggcagccgggcagaggggctcctcacatcccagatgatggacggccaggcaaagacgctcctcacttcccagacagggtggcagccgggcagaggctgcaatctgggcattttgggaggccaaggcaggtggctgggaggtggaggttgtagcgagctgagatcacgccactgcactccagcctgggcaagattgagcactgagtgagcgagactccgtctgcaatcccggcacctcgggacgcccgggcaggcagatcactcgcggtcaggagctggagaccagcctggccaacatggcgaaaccccgtctccaccaaaaaatacaaaaaccagtcaggcgtggcggcatgcgcctgcaatcccaggcactcggcaggctgaggcaggagaatcaggcagggatgttgcagtgagccgagatggcggcagcacagtccagcctcggcttggcatccgtattttactacatttttcaaccaaaaggttaaatacttaaatattgaaagtgacattctggattatccttttccacgcagactacattgcagtttttccttatgtggtgcaaggttataaaaatgccattcagttgatttcttaagtaaaagtagaacgtgttttctcagacagtagcatgagaatttttgacacactaccattagacataatgaaagcaaatgaataaatgtgttgaaatttgtctttattcacgagatcattagaggctaagtcatggcaacacgtgtagttcaattcaattttttttgtgtaaaattttgttgagctgcatccatctgcatatgtaacactaatttggtaacagcttctttatactaagccagaattaatttgtcctcatggttttgttttaaatgtgtgagctgtattatatcacatttgaacaagtaatatagagaatataaatttagtttagagaaagaaaagtacaggcacactaaaaatgaattagaatctggcagctgacactgattaacaggttgagcaaattcaactagacctaaatctctgtaaacaattttgaaagacagaattctaactaaaaacatcttcaacaacataataaacctacgagattaaaaaaaaaagttggtttacccatcatcaatcaatactaggttaaattagaaaattgtgaacacatcatacaaaaagtaaaattactaaactatcctcagacttcatctgattaaaacaagacttctgggtatttgaaagcaccaaattattgatgaaaaatatctattctgaacagatccttgatcttatatacatattactactaagtaaaacctaatacagctttgatttctgaaatatttgtgaatgtctgtcactgcactcaaaaatcaagaaattatttcatctgtctaaattttgaggaaaatatttgctattttaattgaatgccagtagtgtgtgaattcatgtagtgtggcaaaccacccatttctttagtattctgctatttttataaaataagccagaatttgtggagacatttgtaaacaaaaaatctttcctaaaagttagacatcagaaaatagcgatattaatgttacgttatatacacagtttgctaaaccctaccataatctgtaaagtttttgtgtacaacaatcttagattaccgaaaacaaaataaaatttttctttttttttttttttcagacagagtctcactctgtcaccaggctggagtgcaatggtgtgatctcggctcacgtcaacctctgactcccaggttcaagccgttctcttgcctcagcctccctagtagctgggattacaggtgcctgccaccacgcccacctaattttttgtatttttagtagagacgaggtttcactatgttggccaggctggtctcaaactcctgacctcaggcaatccacccacctcagcctcccaaggttctgggattacaggagtgagccatcatgcccagctaatgaaatttctttcttatgttatgcttaacatatatacatatatatatccggacagacaggaactatgactgccactttaaaaaacaaatatttcagcacaatacaatgttttgtgtatgtacagaaggaaaaccaaactttgaagttttcaaatcataaacagaagcattatttgtgattctaagctttaaatatataaaacaaatatttattcttctttttattattatactttaagttctgggttacatgtgaagaacatcagttttattacatacgtgtacacatgtgccatggtggtttgctgcaaccatcaacccgtcacctacattaggtatttttcctgttatccctcccttagccccccagcacctgacaggccccagtgtgtgatgttcacctccctgtgtccatgtgttctcactgttcaactcccacttatgagtgagaacatgcagcgtttggttttctgatcttgtgctagtttgctgagaatgatggtttccagcttcatccatgtccctgcaaaggacatgaactcatccttttttacacctgcacagtattccacagtgtatatgtgccacattttctttacccagtctatcattgatggacatttgggttggtttcaagtctttgctattgtgaatagtgccacaataaacagacgtgtgcatgtgtctttatcatagaatgatttataatcctttaggtatatactcagtaatggaattggtcaaatgttatttctagttctagatccttgaggaattgccacactgttttccacaatggttgaactaatttacactcccaacagtgtaaaagtgttcctatttctccatatccactccagcactgttgtttcctgactttttaatgattgccattctaacgggtgtgacatggtatctcattgtggttttgatttgcatttctctaatgaccagtgatgagcattttttcatgtgtctgttggctgcataaatgttttcttttgagaagtgtctgtccatatctttgcccattttttgatggggcagtttgtttgtttcttgtaaactgtttaaattctttgtagattctagatattagccttttgtcagatggatagattgcaagaattttctcccattctgtagttgcctgttcactctgatgagtttcttttgctgtgcagaagctatttaatttaattagatcccatttgtcaattttggcttttgttgccactgcttttggtgttttggacatgaaggctttgcccatgcctatgtcctgaatggtactgcccaggttttcttctaggatttttatggtcttaggtcttacatttaagtctttgatacatcttgagttgatttttgtaaaacgggtaagaaaggggtccagtttcaattttctacatatggctagccagttttcccaacaccatttattaaatagggaatctttttctcattgcttgtgtgtgtcaggtttgtcaaagatcagattgttgtagccgtgtggtggtatttctgaggcctctgctctgttccattggtatatatctctgttttgaattctgcatttccactttacaaatcccacagttctgctatttcacagtaggatttgacactaaataagtattttttgatggtgacagagtgatatcaatttctgaggccctgttctgttccactggtctacatatctgtttggtaccagtaccatgctgttttggttcctgtagccttgtagtatagtttgaagccaggtagcctgatgtttccagctttgttcttcttgcccagtattgtcttggttgtgcaggctcttttttggttccatatgaagtttaaagtagttttttccaattctgtgaagaaaatcaatggtagcttaatgaggatagcattgaatctataaaattactttgggcactatggccattttcacgatattgattcttcctatccatgagcatggaatgctttcccatttgtttgtctcttctcatttccttgagcagtggtttgtagttctccttgaagaggtccttcatgtcccttgtaagctgtattttcctaggtattttattctcttactagcaattgtgagtgggagttcactcatgatttggctctctgtttgtctgttattaatgtataggaatgcttgtgattttttgcacattgattttgtattctgagactgctgaagttgcttatcagcttaaggaggttttgggctgagaagatggggttttctaaatatgcaatcatgtcatctgcaaacagagacaatttgacttcctctcttcctattttgatacgctgtattgctttcccttgcctgattgccctggccagaacttccaatactgtgttgaataggagtggtgacagagggcatccttgccttgtgccagttttcaaaggaccgtttattcatcttaatttaaaatacagtggtttttgaacaattcaagtagcattagactattaaaaacatcatgagccacacaagtgtcaactgcattttcagaattatgagaacttagaaaaagtaaaccaaacacctttagtttagttaaaaacatactaaactactttgtatttgcccttgtgatgagaatcatctttattcattttggaacaaacaggaaatgctgtggtggtaacttgctggtggtgactgtgatgatatttactgtcttagggatgatgggattcagtggaccagaatcgtcaggaccttactatggtcactgctgtttaattctcttctgtcattcattttccagactccttcatcaatttcatttctatcattgaatgaatgattttgcactgctttagcatctgcctttgatttctgctaattttctttgttcatttttcttgtccatctctggtggctgctttgctattcaactttgaggagtttgtgctgcttcaccctcagctgctccaacagtccatccatttgcctcaagctctctggcagggtctccaggttcttctgtgtctggtgtctgagatttatcagcaggagcttgttttcaatgaccacagctaccgccgtctcctgccagtggggtggtttctacaagagccaaagtgcccatgcccggagacaccttggttataaaccttggtcatggcccagtttggtgcgcaaaaacccaatgtcaaccagagcatttcgcacagatgggtgagctttccttggcacatggggcagttcccccatcatctctatgctgccacctccccttacacaaaggatggtgtaggggcctgaagacaccgtggaagagtccagggagttaggaggggctgggccaggcagcctcaggcccagaggatggcagcaccccctcacacctgagcagacatcagccactgccacctcggggaggacagaggagcccaggctcccccagccagcctcactctaaaccagcagaggaaaaaattattgttattattttttaaagtgagatggagtcccgctctgtcacccaggctggagtgcagtggcacaatctaggctcactgcaacctctgcttcccgggttcaagtgattctcctgccttgcctcccaagcaactgggactacagccgtccaccaccacgcctggctaatttttgtacttttagtagagatgaggtttcaccatattggccaggctggtctcgaactcctgaccttgtgatcaccccgactcagcctcccaaattgctggggttacaggcatgagccaccccgcctggctgaaaaaaaattattttctaaaaaacaaaaaatagtataaaaaataatatgcagaagaacttgcatatctaacctgatcaaatttttattctttttctttttatttctgccttttcctcttaaattgtgctctcctgaagtcatgttccatcctcatgtgggaatttaaaagtaattataatggtcacaaatttagaaactaaaaaattttaatatatttttgcccacaagtcctggtttaacattaaactttcaatagtgctttctgaattctacactttattttctatttgattctgttaactaaaatataggaagtaaaaatataatcttgatttgcagtttcagtttacaaagaatatgtattcattcttttaacctaaatgtgtgttgagcacacatgatatgccaacaatttggtagccttagaaaatagaagccaggcagggtggctcatgcctgtaatcccagaattttgagaggccaaggtgggaggatcacctgaggtcaggtgttcaagaccagcctgacggggtaaaaccccgtctctactaaaaatacaaaaattagctggttgtggtggggggcacctgtaatcccagctacttggggggctgaggcaggagtatcgcttgaacccaggaggtggatgttgtagtgagccaagaccatgccattgcactccagcctggcaacagagtgacactccgtctcaaaaaaaaaaaaaaaaaagatttaaacataatattgttttaaacaattttatgtcattatatttaaaaaattagatacaattattatttttccagaaaggtatgtggcaaaaagtgactgaagaagaaataaaagagagcccaggtgtggtggctcacacatgtaatcccacgactttggaaggccaagttgggaaaatcacgaggtcaggagttcaagaccagcctggccaacatggttaaacgctgtccctactaaaaatacaaaaattagctaggcatggtggtgggcgactgtaaccctagctactcaggaggctgaggcagagaactgcttgaacccgggaggcggagtttgcagtgagccgagatcatgccactgcacttcagcctgggtgacagagcaagactccatctcaaaaaaaaaaggtaaataagaaatctaaaatttatgtttttaattttacaaaaataaaaaatacatctattataagagaacagcttgagccgggcatgctggtttatgcctgtaatcccaacgctttgggaggccaaggcaggtggatcacaaggtcaggggtttgagaccagcctggctaacatggtgaaaccccatctctactaaaaatacaaaaattagctgggcatggtggtgggcacctgggattacaggcatgagccaccacgcctggctgacatctgctattcttaactgctctataagcctgctgaatcacagggccatagagcaatcactgttgtttacatgctttttgtcaggcagttcttatgagcctgcaaatgttatattattcccaaccactgacatcaacatgcatttttttactttttattcaatagggaaaagccccacgtttttgcttccaaccatcacagtcataaagaaatagtcccagttccctggtaactctgctttcccacccctacatgagacagcctttgtgaggcacgcccccatggcttgccttgctcttgtttctggtgcaagtgtattaaacaccttttaatggcattcaactttcttttatgaattaagatccaagcaaaattcaaatcgtgttgctgtgctttgttatcagaaataatatggggttgggatgggtgtggtagctcatgcctgtaaccccagcaaagggtggtgggaggctgaggcaggtggatcacttgaggccaggggttcaagaccaacctggttaacacagcaaaaccccctctctactaaaaatacaaaaattagccaggtgtgctggtgggcaactgtaatcccagctacgtgggaggctgaggtacgagaatcacttgaacctgggaggtggaggttgcagcgagctgagattgcaccactgcactcctgcttaggcgacagtgcaagactctgtcccatttaaaaaaaaagtaattgacagtttcataaaaataatacttaatttgtaggctgatctaggaagcatggatatttcatattcattcctcaaatccataagcataaaattttttttatttatttgcattgtctctgattactttcagtaatgttttgtagttctttttttttatttatttatttgcattgtctctgattactttcagtaatgttttgtagttcttttttttttttttttgagacagagtttcactcttgctgcccaggctggagtgcaatggcgtgatctcggctcactgcaacctccgcctccgcctcccatgctcaagcgattctcctggcttagcctcccaagtagctgggattacaggcatatgccaccacgcccggctaattttgtgtttttagtagagacggggttaatccacgttggtctggctggtctcaaactcccaacacacttactccataattttcttacacctaaggtttgtctttagattaataaatatttaactctatgtaaatcaaaactaaaagtcttatgtgtttgcaggcagacaggccacatgttccaagaaaaatatataagaaatttgaaaaaatattaagaatttaacaatgaattttatttatactcatatataatttttattatgaccataaaaataaccctgtagtaaataacaatttaattgtacattttaaatttaaaaaaaagtgtagaattggattataaaacataggataaatgctacaggtgaaggatgcctcacttaatgctgatattattattatatattgtattcctgtattaaaacatgccatatattgcatagatactcatgcagccaccaaaattaaaataaatttaaatgattaaaaacagaataaaaatttacctacagaaacaatattctttaacttatttgcagttgaaagccactggcaaaaaaaaaaaatcactagagatgttaatctattatcttactaaacagtatattgttaccatcttttacctatacccttgagtaaggtgaaagaggttaaagtttgtggcataataacgcttcattgaatgcacaatagtatttaacatgttaaaaatgttgaattaaactattaacttcacacataatctaaaatttataaatgtactgcattttattatataaaagtacaatcaggccaggctcggtggctcatgcctgtaatcccagcactttgggaggccaaagtgggcagatcacctgaggttggcagttcaagaccagcctgaccaacatggagaaaccctgtttctactaaaaattcaaaattagccaggcatgggggcacatgcccgtaatcccagctactcaggaggctgaggcaggagaatcacttgaatctgggaggcagaggtcacagtgagccagagatcgtgccaatgcactccagcctgggcaccaagagcaaaactctgtctcagaaaaaattagtacaattagtacaataatatactactcatttaattttaaataaaattaaacatgttttcttctcatgataatgcagattactctgaacacctacctgatgcatcactcaatattataggttataagagcctctccacttagatttttattatgcatcttacattttaatgtctttacttttctatagaagaggtaataaacaacacccccctaataaaaaagaatgccttgccaggcatggtggctcacacctgtaatcacactttgggagactgaagcgggcagatcatgacgtcaggagtttgagaccagcctggccaacatggtgaaaccccatctttactaaaaatacaaaaattagctgggtgtggtggcaggcacctgtaatcccaactactcagtaggctgaggcaggagaatcacttgaaactggaaggcggagacggaagtgagccaagatcattccactgcactccagcctgggcaaaagagcgaaattccatctcaaaaaaacagaaaacaaaacaaaacaaaaagaatctctcacatctttgacgcagcaacaattgatcctatgctttcacatttgactccaataggaatgaagaaacagcaggaaataatttcagagttgaatgacatcattattcacttttcaaaaaatctgtatttttttcaagaaatatactttgaatgtaattataattctgcaaaaaaccttctgatcctctgaaagttacatacaaataatttttctgccaactttagttttagatttcctatactcagcactgatttagaatacgtgaagtgtgtcagtgccttatatatttctaccataaattctgatatttgcatagacttaattatggattaaatatttttttacatgtactgcatctgcaaaagcatactccagtatgaactctctgttgttttctaagctgtagtttttgaaaaagtgtttttccaaatttattacatttgcacaatttttccccgatggaactttgttccacagaaggaatctcagataatactttttaaaagccaaccccagacatggatttgtaccatcaaatacctgagttgggtgaatttatctcctcttgaggctccaagataaacctggggttcctgagtttgtcagaaagtgaccttcaggatttctgacctgtggtaagtaaaaatgtcatagtacagggaatatgtagacaagatttgaatccagttttcccgaggggcttttaattggctccataaatcaagtttgattccttaaaaaaggaacaccattccagtcaaagtgttggtaaaataaccagtttctccaattgtgtcctgttacttataaaaaccagattcttggcagggcgtggtggctcatgcctgtaatcacagcactttgggaggtcaagatgggtgaatcatgaggtcaagagatcaagaccatagtggccagcatggtgaaaccctatctctactaaaaatataaaaaatcagctgggcatggtggcgctcgcctgtagtcccagctacctgggaggccaaggcaggaggattgcttgaacccaggaggcagaggttgcagtgagccaagatcgggccaccacactctagcctggcaacagagtgagactctgtctcaaaaaataaataaataacacaacaaaacaaacaaaaaaaaacattcttaatgcacttatgcaaataaatgtattgccataagttaagaatactcacaaatagtttccaaattctagagaaatcaagtagagagaattaaatatgctttaaattttgttcacaggagtatactaacttgttaaaagctgtaaatagatcaaaaggtaggtttccttgactcagaaaacaaaagaaaggatcagcaacattttaagtaaaaagtcaaaaagatcagctggtctcggtggctcacgcctataatcccaacactttgggaggccaagcaggcagatcatgaggtcaggagtttggaccagcctgaccaacatggtgaaaccccgtctctactaaaaatacaaaacttagccaggtgtggtggcatgcatctgtaattcagctgagatcacaccactggactccagcctggaagaccgagtgaaaccccgactcaaaaaaagaaaaaaagattacttcagtcttctaatagttcaatgcatgcacttaatccttgttctgcttaatattcatgaacatttcagctctccatgagttctgaatttttttcctctactctgatgtcaccatctccaaagttatcagaaacttgcattcaagaccacctgttaagagttttatagctgattataaaaccaccttctaaagaggaccaaaacaatacaattgtctgtgaatgacaaaaagttttaaggcaaccaaagtcaaagatacaattgacaaggaaatttgttacctctgtggcaatatagcaattataattactgctaataatgtacactaagtcatataagaattataggagtttcccataattttagaacaaataccaataatatacttatacaaacacagcccaaaaaaaccaaacaccatttcatattcaacaacgttctctgtataatttttataagaaataagcaaaattatgtcatttttaaactttagggaacataatattttaaaggattaggtaagaaaaatacataatttataatttgattttggaaagtttgatggaactttgttccacagaaagaatctcagtcaaatatcaaagatttaaaacacctgatgtcacaggtcattgtaaaataagtcattaatttgaccaaagtaataaagatttcaaaaacaaaaaaagaaaaaaccttcattctttgggagacaagacttaattttccaaacaataatcttcaataaaacagcataaagccaattaaatttgtttttcaaaatgttatgaacaatctataaaattctaatcttgaccatgagatataacttctataagcctttattaaggagtcagttaatgcttcaagaaaaccttgttaatctaacactggggcccctattctggtcttgcattagtgtgcctttgacattaatgattaatgtatagaaaaactgaacttattttatctctcaaaatcagttcttacaatctcacatgcccacctcttttgtgatagtctctgggcctttaggagttgaagagctttaatttcatctcatctgcttcgaaggtggctcatggttgggctatcttcatctaggagagtattccaggccagaccctacttaacctaaaataattaaaaaggtcagaatttgaaaataatttatttaagttcaaatattaaggatagccaccaaataacagatttaagtagccctgaatatatattccaattagtagccattacaagccggttttttggaaacagtgcgaaggcagtttctaagttgtttaccaagaattgacattaaaattattggtaaattgattgggtattgattggctatatatatttgttttacatattttatgaaaaacgaaataatggttgagacagctagtcagaaacaaaatgtctttaaacaattgcccctgtgcacagatgtggggtaagattgaagtctcatactctcatctttctgggcttgataaattgtgcagaactcaaagagcggagactgctctgagctacttttctcaccgccttgctcaggacacataaaccccttaggtgggcagatcacctaaggtcaggagtttaaaaccagactggcaaagatggtaaaaccctgtctctactaaaaataaaaaaaggccgggcacagtggctcatgcctgtaatcccaacactttgaaaggctgatgcaggtagatcatgaggtcaggagttcaaggccagcctggccaagatggtaaaaccctgtctctattaaaaatacaaaaaattagctgggcatggtggcaggtgcctgtaatgccagctacttgggaggctgaagcacagaattgcttgaacccaggaggggaaggttgcagtgagctgagattgcgccactgcactccagcctgggtgacagagcgagactccatctcaaaaaaaaaaaaaaaaaaaaaaattagttgggcatggtagtgtgtgcctgtagtcccagctacttgggaggccaaggcaggagaattgtttgaatctgggaggcagaggttgcagggagccaagatcatgccactgcactccagcctgggtgacagagtgagactccatctcaaaaaaaaccaaaacaaacacaaaaaaattagtcgagcatggtagtatgtgcctgtagtcccagctacttaggaggccaaggcaggagaattgtttgaacctgggaggcagaggttgcagcgagccaagatcgtgccactgcactccaacctgggtgacatagtgagactgtctcaaaaaaagaaaaagaaaagcaatagttgtgttgtgggattcaggagactggagagaccaatgggtgagacaggagaatttcattaaggtggccactggctcagtggattcaaatccaaaaggctgagccccaaacaaagatgaggcttggcttttaagcatgcagtggcatgaaactcaggggcgggcttagcatcctacagaagcagaacgaaggcagttaatcaaacagtgaaaggtatgtgactcaaacatatctagtgacctctgctgggctgatcatcagactctcagcagatggtaactatcttaggtttgctcaggtatgtcttgtgaccttcgcagtgttgcactgatggaaaataggaacttacaaaatctttacaaacttacagaaatagttaaaaaatagttatgagagcagagcaaagaaatgctggtctgggaaggaatctcaagagagggaagctgataagaacttgttattctcatccctgttcctggagtccattccttctgggctctgcctggctttgcagataacattatcttagtcctcgcaggcccttggagtgagtcaacccagtacagggaggaacttaggtttttctcctttcaatttctgctttagttgaacacagaatattattttataaataacgacttagtaattatatagaaatcactaatcactttactaatacactgcatgtattggtgttttgttttgttttgagatggagcctcactctgttgcccaggctggagtacagtggcgtgatctcagctcactgcaacctccacctcccaggttcaagtgattctcctgcctcagcctcccaagtagctgggattaccggcacctgccaccacacccagctgatctgtatttttagtagatgttggccaggctagtctggaactcctgaccttaagtgagccactggtctcggcctcccaaagtgctgggattacacgtgtgagccaccatgcctggccagtttagaacttttacaaaatgaaataataaaactgaattaatttattttaaaacaatatgaacaagtataataaatattacaagtccccattcagataaagtttatttatttatttatttattttgagatggagtttcactctgtcacccaggctggagtgcagtggtgccatcttggctcactgcaacctccacctccccagctcaggtaattcccttctctcagcctcccgagtagctgggactacaggcacatgccatcacgctcagctaatttttgtatctttattagagatggggtttcaccatattggccatgctggtctcaaactcccaaccacaggtaatccacctgcctcagcctcccaaactgctgggattacaggcgtgagccacattgcccggcccattcagataaagttttattaactctatgaagatttgataaatggcaaatatgacattttcaaatagttttgtgatgaccagaaaaaataatctattaggtatttttataacaaaataagacaaaatgatactagtgatattattacaaaatattttcattatttcatatagtatatcataaatttaatcttaaaatattataaatatgctagaggttctcaaaactaaaaaaaaagcaaaataactaaatcattcaaaattggctttttttgttgttttaaaaataaagtttaaggctaggagcggtggctcatgcctgtaatcccagcactttgggaggccgaggcgggcggatcatgaggtcaggagctcgagaccatcctggctaacacagtgaaaccccgtctctactaaaaatacaaaaaaattagccaggtatggtggcgggcaactgtagtcccagctactccggaggctgaggcaggagaatggcgtgagccggggaggcggagcttgcagtgagccgagatcgtgccactgcactccagcctgggggacagagcgagactccgtctcaaaaaaaaaaaaaaaaaaaaaaaaaagtttaaggctaatcatatgggtaatacaactagacccctacctgtattaatacaattacaatttgacatgagatttgggtggggattcagagtcaaaccacatcattctgctcctggccctcacaacaaacctcatgtcctagtcacatttctttttttttttttaagatggagtctgactctgttgcccaggctggagtgcagtggtacaatctctgctcactgcaacttccacctcccgagttccagcaattctcccacctcagcctttcaagtagctgggattacaggcatgtgccaccatgcttggctaattttttgtatttagtagagatggggtttggccatgttggtcaggctggtcttgaatgcctgacctcaggtgatccacccacctcaccctcccaaaatcctgggattacaggtgtgagccaccatgcccagcctcctagtcacatttcaaaacacaatcatccattttcaacagtccctcaaaatcttttttttttttttttttttaaagacagagtctcactttgtcacccaagctgtagtgcaatggcatgatctcggctcaacacaacctccacttcccaggttcaagcaattctcctgcctcagcctcccaagtagctgggattacaggcacccaccaccatgcctggctaatttttgtatttttagtagagacagggtttcatcattttggccaggctggtcgcgaactcccgacctcaagtgatccgcctgcctcagcctcccaaagtgctgggattatacgagtgagccacggtgcctggcctgctcccccaaattcttaactcatttcagcataaacttaaaagtccagtccaaattctatctaagacaaggcaattctcttccacctatgagcctgtaaaatcaaaaacgacttagtcacttccaagatacaatggttatgcaggcattgggtaaattctcctgttccaaaagggagaaattggccaaagcaaatgagctccaggtcttatgcaactccaaaacccagaagggcagtcattaaatgttaaagctctaaaataattcccttcaactccatgtctcatatctaggccaccatgatgcaaggggtgagctcccaaggccttaggcagctccacccctgtaatctgcagagtacagcccctgcagctgctttcacaagctggcattgagtgcctatggcttttccatccaactcatataaacttacttaaccttaatcactttctaaaattgttgttttcaaatagaatcacattggaggttatggcttaccatatgaattttgatagaaaagtcagtctaaatcatgggaaataaccatatagaggtaatattttatatctcattggaattaatataaatatgtttttattttttattttttgaaacgtagtctcactgtgtcccacaagctgcagtgcagtggcgcaatctcacctcactgcaaactccgcctcccgggttcatgccattctcctgcctcagcctccagagcagctgagactacaagcacctaccaacacacccggcttattttctgtatttttagtagagacagggtttcactgtgctagccaggatggtcttgatctcctgacctcgtgatccgcccgcctcggcctcccaaagtgctgggattacaggcgtgagccaccgcgaccagctgaattaatataaatatgaagcagattctggtaagttaagatgtatattataaggcctagagaaacaagttagtaactttaaaaacatgaacaatcactatagaaatctaaatattacatggaaagtatctaatataaaagaaagcacttaagaaagactagcccgggcctggtggctcacgcctgtaatccagcactttgggaggctgaggcaggtggatcatgaggtcaagagttcaagaccagcctggccaagatggtgaaacctcatctctactaaaaatacaaaaattagctgggtttggtggcaggcgcctgtaatcccagctacttgggaggctgaggcagagaattgtttgaatccgggaagtagaggttgcggtgagccaagattgtgtcactgcactccagcctgggtgactgagtgagactgcatctcaaaaaaaaaagaaagactaaagacaattctaaaactagaaaaagactagagtgtggttgaggacacatggcccaataaagtttccaaaggaaaacctcaattcaaagatgtctgggcaaggcatttgtgcctgtggaagataaaaggagaaaaagcgggaaaatttttgacagtggaatgtaaggggattattttttacctttctctcatgtaaaatatttacaaatagaaaacaagtatttttaaaagtgtcatccagtgctctgtgacaaagtgattaattaaaatactgtttctgaaatgtacaataaaggacaaaaatagttgataatgttgtgaattgaaggggagaagttggctttggggaatgttggaaagaaactgggaatttaagattttactgcaagcctggcaaggattttactggcaaggctgaacaggacagagtagtggatttgagaccctgcttgccacacatgtggaaaatacagggtgacaccagtgcgtctgattaaagtcaaaataattaaatagcaatatttggactgaagtggcgttagtggtctaggttcctatgtaacaacaacaacaacaataaaatctagctcaaatgtattttttgtaagttactaccttaagagaaaacaaaattcaggtttaatcaaccacaaatctccaattaatctgattacataacgaaagaattttctcctggacactgcaaatggactacctaactgtacccaatcgattaatttgctttgcttcatcacacaccttatagaagccttttcttcaagaccctctggtagccccaaaaccacaaacgtcgggcgcagtggctcacgcctgtaatcccaacactttgggtggcccaggcaggcggatcatctgaggttgggagttcgagaccaccctgaccaacatggagaaacccccgtctctactaaaaatcaaaagtagccgagcgtggtggcgcatgcctgcaatcccagctaagtaggaggctgaagcaggagaatcgcttgaactcgggaggcggaggttgcggtgagcctagatcgtgccattgcgctccagcctgcgcaacaacagcgaaactcccatctcaaaacaaaacaaaagcccccacaaaccatgtctggggactgtcccattgattaatcactgtttgtgcatactaagtcttttttttttttttttttttttttttttttgagacggagtctcgctctgtcgcccaggctggagctcagtggagcgatcttggctcattgcagcctccgcctcccgtattcaagcgattctcctgcctcagcctcccgaggagctgagattacaggcatgccacgcctggctaattttttttgtacttttagtagagaccgggtttctccatgttggtcaggccggtcaggaactcccgacctcaggtaatccgcccacctcggcctcccaaagtgttgggattacaggcgtgaaccaccgcgcccggccatattaactctctaatggtgcttcagtttatttttgaacagggtaaagtaggaactggggaccccacagaccgcagctccttccacgcaggagacccgcacaaccagtcggagtctttccctgatgacctcacaacctggggaagatgacgggctgcgggcgcagagctgcgcaaagagggctacaggctggggctaaagccgctgtgctgaaacggtaaaggacgccccggggtccctgcaccggaggagagtgagggctgagctgcggggcactcaggctcacaagaccgtcccgccaccgccatttctggcgcgtcccaaagaggcctcccccgtctccaaacgccctgccccgcacactcaccttttctcggcttcaggaatgtcctggagtctatgaatcttccagcaccatcagttcaccgcgtgatggaggctgaggctgtggccgaatcaccgagacccttggaaagaagacacagggcagtgaagagctaacctcgagctctggctggagcaagagacaaaggccccgccaggtaccgggagccaccccttcctctctgactgtgaacctgattggacagttcccaccccagcgcccttaatggatagagctccaggctccgcgccctcaggccttgagtgacagaagacgcgatcagaccttgcactgaataccgcgagcgtgacaggctcttggctccagtcatttcaggaagggctatctctgggttgggcccacatgtgcccaggggttattttaaatcttgtgtataaggttatgtccatttataaattttattcatacacacatatatgttgttcacaaatggaaacactataataacaattattttaaaatttaacatttcataagctttctggcctttagtcttttgagtaggcaacctgggattttaaaagaaaaacagggccgggagtggtggcaccaagaagaaaaaaagtttatagaatctcaaaaagaaataagaaaaaggcggggcatggtggctcacgcctgtaattccggcactttgggagaccgaggcgggcagatcacctgaggtcgggagttcgacaccagcctggccaacatggtgaaaccccgtctctactaaaaatacaaaaattagccaggcgtggtggcaggcgccttaatcccagctacttgggaggcagaagcaggagaatcgtttgaacccgggaggcggaggttgcagtgagccgagatcgagccattgcactcaagcctgggggacaagagtgagacttctctcaaaaaaaaaaaaaaaaagaaaaagaaaaaaaactctttaacttaaacacacacacaacttcagagaaaacgtatctgagaatgtgaaacacccagcattcatagcctggctgattactgtcagtatctcccctttactaagccggtctttaaatgctggattagatggctgttgtataaatcctcagatatcacttaaaaaaaaaaatcacagggcatagagaaaagacaggaaatatgtcccacttgaaggagcaaaataatatccagaaattgaatcttaagaaatgaagtttttgcatatctgataaagaattcaaaatatttggccgggcacggtggctcatgcctgtaatcccagcactttgggaggctgaggcaggtggatcacaaggtcaggagttcgagaccagcctggccaatgtggtgaaacctggtctctactaaaaatacaaaataataggccgggcgtggtggctcacgcctgtaattccagcactttgggaggccaaggtgggcagatcacgaggtcaggagatcgagaccatcctgactaatatggtgaaacctcgtctctactgaaaaaaaatacaaaaaattagccgggtgtggtggcaggcgcctgtagtcccagctacttggagggtgaggcaggagaatggcgtgaacctgggaggtggagcttgcagtgagcccagatcgcaccaccgcactccagcctgggcgacagagcgagacttccatctcaaaataaataaataaataataatcatcatcatcttagaatgctcaatgaacaaaaataaaacacaaatagacaactaaatgagatttagaaataatgagcgaaatatcaaagatataaaaacttttttaaatttttaattaatttattttttttagatggactctcgctctgttgcccaggctggagtgcaatggtgcgatctcagctcactgcaacctccgcttcccgggttcaagtgattctcctgcctcagcctcccgagtagctgggattacaggcacctgccactgcgcctggcaatttttgtatttttagtagagaaagggtttcaccatcttggccaggctggtcttgaactcctgaccttgtgatccacctgccacggcctcccaaagtgctgggattacaggcatgagccaccatgcccagccagcaggcaggttttcttgtagacggaatgaaagcaaggaaagctggaatgagctcagccctatcaggcaccctaaaggctgcctggggttgcctgcaaggccatctagccttctgcttcctggcaggctggtcaagcacttattctggtctctttgagactttgatttcctggaaggagagggccctcctttccactggactgagtggccagggccatccagcttcccaccctccactaacaaccatggggtgccctcctgagcacacactgcccaattatggcccttcttaggcaggagctcatttgtcttacactttcagcctgctggggcttagaagttatcagtgctgttattaagatagagaaatgaggggggaaagttgctttaaaaatcttccataatcttattatggaaatcaccagcgcagatgccagcacaggtggggctcctgaggatgctgggggagagttcccagcctgtcctggcagccggtccttgccagggatggctcatgccccagctccagagagaagcaggtagacatctctgcaaggagctgcgggctgcagctcaggacagccaagccccactggtggtggagtggggctacatcccatcaggctgtgtctcttccacagcagacccttggagccaggaggtgatttacagtgtgtgcaaggcagtaagctccatcagctgcatggccttcagcactcacttcaacattcacttcaactctgatatctcgccacagaagcagtggggactggcctgtgcagaagccctgaaagtgggacagagcctcatgtggccgggcggcaggtggggcaaggaggggttctgagtcctcggtgctggttggcctgtctgcccatctgagcactgctccctgggagtgtgctctgcaggcctcctaaaggagggctgtgagctcatcactgaggccctgagcacctccttgctcctccccactacattaccggtgactatgctgaggtgggcctcgagcaccctctgggctgtgtcatcaaacgtctttggacctggcctggcaaatgagggatggcaaatgaggagtctggagtttcattgtcaccctctatggtagcaggaaatgggagagtccaggcctgcaggactggaaccctatcgagggagttaagaggctgttcacttcccctccgggccccatgtggaggagtggatggagtctagggagacactggggagtcacttgttttgtctgggcttcccctagttccaccctttgttaaccatttccttgggagagttcaggaaactcctgtgctctagtgaggcgggacctcccctcacagggtattggtgaggaggcgttctgagactctgagtgagaagctaccacagtgcctgacaagtacctgtgggagctgtcatcctctgtaaccaccatgtggccttgtagtgttcaggctgcctgtcctgtcctaaggcttggtggggcttttggggggtcagctgctttagggtcccactctctcctcaaagtggctgtttttgtgtttgtttgtttatgggttttaaaacacttaatatttcatttatagtagtttcaggcttgcatgtgtgtatttgtatagattttattagaaagaaaaggacttaagacaacatttttagaaggtctccgtggcgcatagagttccatgtcacaacagctgatgttgacctccttctgttgcctttgtgcaaagtataaatagaaagtgcaagccagaggtgccgaggctcagtgtctagagctgagccacttgggcttgcttgctggcctgcagccacgtggactctgggtgtgaggtgttgcccatcctggatcaacagcccccacccctctccccaggtcctgagtaaccaacacaaggcagtgctaatgagcaggtgagaaatggacatcgagcaccccaataccacccaggaagatttgaatggcatttggactcaggctgtgtgggggtaggggctgtgtgggggtaggggcttgtcatggtgccacccacagatgcccctgccctatgctgcttccccagcagccagctgtccatggccctgagcctgtcacaccatgcctgctacctcacgctgttcatgtttgatgaaaaccatcccaagatggtgctgctggatgtgagtgctggaaagggggcagcaccattgtcctaggagattatgagctgaccagatccctactgactgccccccaggacaagtgggggctggtgctgcattgaatgatgccccccccaggagatgtgtttgcattggctcaatgaatatacaatgcagaggcataaatgaagacatgtgaatggtgtatgtggacatcagcttgcagctgggaaaaaggtgcctctcaggtccctcattcttcccagcaactgtagaatgtgtccatgccaatgagtgtatagatctgtccttcttaacttgtacacaactccaggtcagttccgagtgaatgacatgcagatgggatttctcgagtcatttgtatgcttcatattatggctgctgcttttgctgccactacccccagacccaacctggtttgaagttcaggctttaagtaaaaaagatcgagggcctccttgtgttctgggatggaaagtcagagacctgtggtagggctagggttttgggtacactttagttttgtggcaggatgagaactgcagtgattataattgtgattggcctggcctgattgtaactctgggtgacagggagggagtcagcagtggtggtcccccagacatccatgtgcctaggcctggcctgcctgccctcagtaccagcaaaaaggcaacaccacaggctctgacttgcctccctactccctgcaccccagatgggaataccttggaggctacaatctgaatgtattattctccctgtcttaaccagacctccctaacacacactgagggtagagtaggtttggggcctggggagaaccagagctgaatcatgaatcccgggggaatgttaaagatacaggagtggttgtcaccgctctgttgagcccagcttcctacctggtcctggccacacagccccttaaacggagactagctctgggggtagttagggaccctataggcccaggctgctctctgtccccacctgccggtgctacttctcttgcctactgtcagagccctaacatggagaaggaggttgccaccctgtgagcctgagggagctgtgtctgactggggcttctgcctgggattttgcaaaaagatacctatgaatatggtttgcctagatatcttgtttttggttttttgtttttttttttttttggagacggagtcttgctctgtgcccaggctggagtgcaatggcgtgatctcagctcactgcaagctctgcctccttgggttcacgccattctcctgcctcagcctccccagtagctgggactacaggtgcctgccaccacgcccggctaatttttttttttttttttgtatttttagtagagacggggtttcactgtgttagccaggatggtctcgatctcctgacctcgtgatccgcctgcccagcctcccaaagtgctgggattataggtgtgagccaccgcgcccggccgatatcttgttttaaagggagtggccataagctagcaagtggagcatccccaccactgattaataacattttcttgtttttaacccatcatattttcatatcacattagaataaagtaagtttttataaactactgctccagcctcacccgtgtgttttgtaacccagtctgatttgattgtgaggactgttgtcagaaatgttgctaagagagaaatatgtataaattagatcatatttaaggttatgcttataatgccacttgagtgggaagtaagagtgtggagtcacagggactcagctggggtttgcccacaccacttactaggctcatgaaagtgtggcacaggtgaatatcacctgtcattggtgacagaagaaaaaaggctaaggccaggcgcagtgcctcaagcctgtaatcccagcactttgggaggtcgtggtgggctgatcacctcgatcagtagttcaagaccagcctggccaacatagtgaaatcctgtctctactaaaaatacaaaaattagcttggcatggtggtgtgagcctgtaatcccagctacttgggaggctgaggcaggaaaactgcttgaaccccagagatggagttgtagtgagccaagatcatgccactgcactccaacctgggcaacagagcaagcctacatctaagaaagaaagagagagaaaggaaggaaggaaggaaggaaggaaggaaggaaggaaggaaggaaggaaggaaggaagggagagagaaaggaatggaaaggaaaggaaaagaaaaaaagaaaagaaaaaatcctggagggaaggccaggggaggagagatgctaggctgtggggctgagcactgggcatgctggacctgttaggtcactgaacatctaactgccaaggcacttgcccttgtcaggtcagtcgaggtaaggaaattaggcagcactctccagaagtcccactgtactgggagaatggaggagggtctacaacttgccattctagggtaggttttagagcaagctgggctctcttggagagctaatgagatgggaggaaggcaatattccagacctgagggacagagcctgtgaagtaagagggggtatgtggaggtggcctgaccctataagagggggagttcacagttattatagctggtggctgttgctcagccatccctctccagagcagacacacacacacacacacacacacacacacacacacacgtgtatatttcactctgtcacccaggctggaatgcagtgactgaatcatgggttactgcagcctcaacctcttaggcttaagtgatctttccacctcagcctctcaagcagctgggactataggcatgcaacaccacacctggccaattagcctcatgtatagctaaatgccctttggagtgtttggagagtccttcatgtcttagaaattctgaaaaaacaaacaaacaaaaatattccaatcctaatgtctgttagttcctctgagccaagtgggaaaagatgtccttcaccttgaagttttaagtgatacccaaggatagccaccagtgtcttggccatggaagcctcctgcgtgcttcctgcccccagtttgatttgcagcctcatggttgtgttgtcctaaacatgctttcctctggccttgtccagtgaatatggttcacgtggggaacaccacttcttgagggcgacaccatgtaaagctgagaatggattgggtttaggtacattgtaactccttgtcacctgagaggcccatttttcctgattgattccttaagtgtattagtgctgtcagacacctttggacaaatcaaataacaaggggctgtagttttataaaggaaacaaagtctttaaatatcaaatcctctttttctcctccatgttttttttaggtgaaatatttcaatttttcttttctttctttctttttttttttgagacagagtttcgctcttgttttctaggctggagtgcggtggcatgatctcagctcactgcaacctctgcctcctgggtttaagtgattctcctgcctcaacctcccgagtagctggggttacgggcacgtgccaccatgccgggctaattttgtatttttagtagagacggggtttcaccatgttggccaggctggtctcaaactcctgacctcaggtgatatgcccacctaggcctaccaaagtactgggattataggcatgacccaccgtgcccggcctcaatttttctttaaaaatgggtaaatagtggtatgtcagcaggcttagtgtgagaattggcatgtggctgggagtggtggttcatgcctgtaatcccagcactatgggagggtgaggcaggcagataatttgaggtcaggagtttgagaccagactggccaacatggtgaaaccccatctctaccataaaatacaataattagccaggcatgatggtgggcacctgtagccccagctacttgggaggcggaggtaggagaatcgcttgaacccaggaggcagaggttgcagtgagcccagactgcaccactgcaccgcagcctgggctacacagtcagtcagaccctgtctcaaaaaaaaaaaaaaaaaagagagagagagagaattggcatgagctaggtgatggttcctgtgtggatgggcagtttttcaaaatagaaaaccaagtctcaccgagttgcaggagccacttttctttttttttttttttaatctatttttatttttttgagacagagttttacttttgtcgcccgggctggagtgtagtggtgtgatctcggctcactgcaacctccgactcccggtttcaagcgattctcctgtctcagcctcccgagtagctgagattacaggtgcccaccaccatgcccagctaatttttgtacttttagtaaagacaaggtttcaccatgttggcaagggtggtctcaaactcctgacctgaggcgattcccgcccaccttggcctcccaaaatgctggaattacaggtgtgagccaccgcacccagcccacactcacctttcttcacatacccccacccccaaggtctttcactttttttctgtgcttgaaatttttttaacatacatattatttttaaaaataaattatataacacacacacacactcagaggtctcactctgtcacccaggctggagtgcagtggctgaatcatgggttactgcactctcaaactcttaggctcaagtgatttttccacctcagcctctcaagtagctgggactataggcatgcaataccacacctggccaattttaaaatttttttgtagagactgaggcttaaaatgttgcccagactggtcttaaactcctgggcttaagtgatcatttcaccttggcctgcctcccaaagtgtttggataacaggtgtgagccatcaagcccaggcaaaaaaaaaaatttttttttttttttgatacagagtctcgctctattgctcaggctcgagtgcagctgcacgatctcggctcaccacaacctctgcctcccgggttcaagcaattctcctgtctcagcctcccaagtagctgggactacaggggcctgccaccatgcccagctaatttttgtatttttagtagagacggtgtttcactatgttggccaggctggtctcaaactcctgactttgtgatccgcccacctcagcctcccaaagtgctgggattacagacgtgagccaccatgcccggcctcaaaaatatatattttaaaatttttatttctttttgagacgaagtttttcccttgttgcccaggctggagtgcaatggcatgatctgggctcactgcaacctgtgccttccaggttcaagcgattgtcctgcctcagcctcctcagtagctgggattacaagcatgtgccaccacgcccggctattttttgtatttttagtagaggtggggtttcaccatgttgcccagggtggtcttgaactcctgacctcaggtgatccacccgcctcggcctccaaaagcgctgggattacaggcgtgagccgctgcagctggccctcaaaaatattttttaaagaactgttacaaccaaataatgagctatgatgtgccactgcactccagcctgggcaccagagtgagaccttgtctccaaaaacaaaacacaaaaacttataacaaaattgaactaataaggttgtgtcatctgtgtcccctccctaccctccaagctatcactgttaaatataatgggtattgagaaaactgttagatattattaaagaattcctatgtatcctccagttgaaaaggtgttctgatgtggctcaagtgctttctgacctctacctccagggtctaaactagcaaatcaaatcaggacacctacagaaaaccgttggccattttcttttctttctttcttttttttttttttgagacggagtttcactcttgttgcccaggctggagtgcaatggcgcgatctcggctcactgcaacctccgtctcccaggttcaagcaattctcctgcctcagcctcctgagtagctgggattacaggcgtgcaccaccacgcctggctaattgtatttttagtagagacggggtttctccatgttgaggctggtcttgaactcctgaccccaggtgatccgcccgcctcggcctcccaaagtgctgggattacaggcgtgagccacagcgcccagcctggccattttcaaatagaaaatgaaacacacccgttaatgaaagtaatccagtgattttcaaaaggagaagtcagactgagatgcagcgcagtcagggcacaattaccccaaggatagacgcttcacacaaaatgcctgaggagcctttctaagatgagcacatttggccaacgtaattcatgcttacccattctcagccccctctgcccacctcccccccgccccattcctaatggccatcccacgatgtggtcagcagtgtggtacagcatggtgagagaggggctcagggatgggatgaaggtttttcctgcattatcaaaatgattaaaaagttgttaaaaaggtgtccaaattttctttttaccctaaaataactactcagatgcattatacaagtagacccaggtaagggaaagagcaagcgcatttcaagcctcagctcacttcttaattagctgtaattccctgagcaggtgaccctgcctacttcagcctgtttccctgcccataaaatgcactaatgctggggaagccgcgctgggaggtgggtcctgaagctttatccaatcagtggcgctggcgcgggaaccgcccaatcaggcgcggagttggagaggagggcgtggcctccggcatttggcgggccctttgtctcgctcctgccagagttttagttgcctgtctctgctattctgcgtcctccacctcgggagccccaggtgactttgtcacagccggtgggtgtgcgggttgagcatcccgagatgggagagcggcctgtgaaaccggctggaccggcctccccacagtccgctcctgggtcgccgacctgagtccccgctggcacagctccgctccaggccactctggccgcaagatggcggctggactcgcagccaggaccacagcgtcccgccagtttctgcgcggcgccagtccggggctctctgggcagctctgcacccgcaatcccgagtatttcccgggttgttcagggaagacaggcgggtcatcggcagaatccccactcggtgtatgcgttggaggggctgctgcccgtggggtcttaagtcttttctgattattattatttttttgtgagacggagtctcgcttttgtctccaggctggagtgcagtggcatgatctcggctcactgcaacctccgcctcctgggctcaagcgattctcgagcctcagtctcccgaatatctgggattacaggcacccgccaccatgcccggctaattttttgtatttttagtaaagacagggtttcactatgttggccaggctggtcttgaactcctgacctcagatggtccgcccccctcggcctccgaaagtgctgggattacaggcgtgagccaccgcgcccggccacaaagaaatttttccgccgtccttttcggccacaaataaatttttccgccgtacttttcgtatttattaaattttctcattagagcctattattgattgtaatgcatttttctgtgaaattttgctgccattcattgaatgccaatgattcagaatgcctgctctgcaagagtacacacagctaaaaactgtagatatctaaagaattatttttaatatctatgttgtattcagcatattatgcgttaaaatctctcttggccgggcgcggtggctcacccctgtaatcccagcactttgggtggccaaggcgggtggatcacctgaggtcaggagaccagcctggccaacatggtgaaactccttctctactaaaagaaaaatacaaaaattagccaggcttggtggtgggtgcctgtaatcccagctactcgggaggctgaggcaggagaatcgctggaattcggtaggctgaggttgcagtgagccaagatcacgccactgcactccagtatgggttacaagagcgagactccgtctcaaaaaaataaataaataaaatctctcttatttttatttctacattagtgtttcttttcgagggggtatgtttttttagatcagttaattgtatttttgctttcaaagcttgatattatgaattgaatgataattttcaactctgtacaattttagacaatgtgatgcttaatttatatatgaattagccgtatgtcatctatagaaatatcgatgtgtttttcatctgtgttgccactacttcgtttatgacatactctttccatggttttcaatgattattctgtctaggtgagtagtcgggaaaataatcctaaattcacaatctacttatattttgaatctgtataattatgtgagaagaacactctttatttgaaggtaatgtttgaaaaatgtcgtaatgtctcttatgtagtctttaatttttttttttgagactgagtctctgtcgcccaggctggagtgcagtggcgcgatcttggcgggactccatctcaaaaaaaaaaaaaaagagcttctgcacagcaaaagaaactatcaacagagtaaacagataacatacagcatgggagaaaatttttgcaaactatgcatccgtcgaaggtctaatgtctagcatctataagaacttaaacaaatttacagtagaaaaacaacaaccccggctgtgcgtggtggctcatgcctgtaattccagcactttgggaggtcgagacgtttggatcacttgaggtcaggagttcaagaccagcctggccaacatggcgaaaccctgtctctactaaaagtacaaaaattagctggctgtggtggcatatgcctataatcccagctactggggaggctgaggcaggagaatcgcttgaacccaggaggcggagattgcagtgaaccaagagtgcaccactgcactccagcctgtgtcaaagagtaagactctatctcaaaaaaaaaaaaaaaagaaaaacaccaactccataaaaaagtggatgaaatagggccaggctcagtggctcatgcctgtaattccagcactttgggaggccaaggtgggtagatcacttgaggtcaggagttcaagatcagcctagccaacatggtaaaaccccatctctattaaaaatacaaaatatcgctgggcacagtggctcatgcctgtaatctcagcactttgggaggtcaaggtgggcggaccacctgaggttggcagttcgagaccagcctgaccaacatggagaaaccccatctctactaaaaatacaattagccgggcatggtggtgcatgtttgtaatcccagctactctggagactgaggcaggagaatcacttgaacccaggaggcagaggttgtggtgagccaagagtgcaccattgcactccagcctgggcagcaagagcgaaactccatctcatgatggtggacacctgtaatcccagctactagggaggctgaggcaagagaattccttgaacctgggaggcagaggttgcagtgagctgggatccagcctgggtaacagagcaagactgcctctccaaaaaaaaaaaaaaaaaagtgggggaaggacatgaacagacgtgtatcaacaatcatatgaaaataagcgcaacaccactgattgttaaataaatgcaaatcaaaaccacaatgagataccatctcatgcctgttagaaaggctatttttaataagttacagaaataacagatgctggcgaggttgtggagaaaaagaaatggttatatactgttggtgggagtgtaaattactttagccattgttgaagacagtgtgttgattttttttttttttctcctgagacagagttttgctcttgttgcccaatctggagtgcaatcacacgatctcagctcactacaacctccacctcccgggtttaagcgattctcctgcctcagccccctgagtagctgggattacaggaacgtgccaccacacccagctaatttttgtagttttagtagagacagggtttcgcctcattggccaggctggtctcaaattcctgaccttaggtgatctgcccgccttggcctcctaaagtgtggggattacaggtgtgaactgccatgcccagcctagtgtgatgaggaatcctattactgtatatacccacaggaatataaattattctattataaatacacatgcacatgtatgttcactgcagcaccatccaccacagcaaacacatggactcaacctaaatttccatcaatgatacactggacaaagaaaaatgtacatatataccatgaaatactatggagtcataagaaaaatgagatcatgccccttgcagagatctgcatggagctggaggccattatccttagcaaactaacacaggaacagaaaaccaaatactacttgttctcacttatgagtgacaagtaaataatgagaacacggacacgggggggaatgacacactggggtctttcaaaaagtggaaggtgggaagagaggatcaggagaaataatggtactaagcttaatacctgggttattaaataatctatacaaccccatgacacaagtttacctatgtaacaaacctgcacttgtaccctaacacttaaaagtttttaaaaagacctatttgtaccttttaaagaggaatcagccagtaatttcaaagatgattttgtttataaaacataatcttccacttgtccagtaaatgctcttcatttatttatttattggagacagacactgtctcccaggctggagtgcagtggtgcagtctcagctcactgcaacctttgcctcccaggttctagcgattctcctgcctcagcctcccgagtagctgggattacaggcctatgccaccacacctggctaattttttattgttattagagacgagatttcaccatgttggccaggctggtcttgaactcttgacctcaggtgatccacctccctcagcttcccaaagtgctgggattacaggcttgagccaccacgctcagccagaagctctttaacttaattagatcccatttgttaatttttccttttgttgcaattgctttggcatctttgccatgaagtctttgcctgcgcctgtgtcctgaatggtactgcctaggttgtctttcagagtttttatagtttgggttttacatttaagtctttaatccatcttgagttattttttgtgtatggtgtaaggaagggatccaggttcaatttcctgcatatgactagccagttctcccagcacaatttattgcaaattctttccccattgcttctttttgtcagctttgtcaaaggtcagatggttgcaggtgtgcagcttgatttctggccctctattctgttccattgatctatgtttctgttcttgtactagtaccatgctgttttggtgctgtagccctgtagtatagctggaagttgagtagcgtgatgcctccagctttgttatttttgcttaagattgccttggctattcaggcttttttggtttcatataaattttgaaataattactttaaattctatgagaatgtcagcggttgtttattgggaatagcattgaatatataaattgcttttggcagtatggacattttaatgatattgattctttctattcatgagcatggaatgtgttttgtttgtgtcatttctgatttctttgagcagcagtttgtagttctccttgagatctttcacctccctagttaggtgtattcctagatattttattctttttgtggcaactgtgaatgtgagtttgttcatgatttggctctcggcttgagtgttgtttgtgtataggaatgctggtaatttttgcacattgattttgcattctgagactttgccaaagttgtttatcagcttaaggagcttttgagctgagactatggggttttctatatataggatcatgtaatctgcaaacaagaatagtttgatttcctttcttcgtatttggatgccctttctttctttctcttgcctgattacccagaccagaacttccagtactatgttgaataggaatgatgagagacgacattcttgtctcattctggttttcaaggagaatgcttctagctttcgcccattcagtataatgttggctgtgggtatgtcatagatggctcttatcattttgaggtgtcttttttttctatacctagtttattgagagtttttaacatgaatagatgttgaactgtaatgaaagtcttttctgcatctattgaaataatcatgtggtttttgcccctagttctgtttctgtaatgaatcatatttattgatttggatatgttgaaccaaacttgcatcccagagatgaagcctacctgatcatggtggataagttttttgatttgctgctgaatttactttgctagtattttgttgaagatttttacatcaatgttcatcaaggatgttgacatgaagctttcttttttgttgtatctttttcaggttttcatgtcaagatggttggtcctggcctcatagaatgagtttagggagagtcccttctcctacattttttggaatagtttcagtaggaacagtaccagctcttctttgtacatctgggagaattcagctgtgagtccacctggtcctggacttttattgattggtaggctatttattactgcctcaatttcagaactcactattgttctgttcagggattcagtttcttcctggttcagtcttgatagggtgtatgcttccagaaatttttccatttcttctagattttctagttcatgtgcatcgacttgttcataatattctctgatggttctcttctctgaggtcagtggtaatatcccccttattgtttctgattatgtttatttgaatcttctctctcttcttattagtctagctagtggtctttttagttattttttccaaaaaaatacttcctggatttgttggtcttttgaatgtgttttcatgtcactgtcttgttcagtgcagctctgattttgattatttcttgttttcttctagctttgggatttgtttgcttttggttttctagttcttttatttatttattttattgtatttatttattttttgagatggagtctcgctctgttgcccaggctggagtgcagtggtgcaatctcggctcactgcaacctccgcctcctaggttaaagcgattctcctgcctcagtttcccaagtagctgggatggactacagggatgtgccaccacacctggctaattttttgtatttttagtagagatggggtttcaccatgttagccaggatggtctcgatctcctgaccttgtgatccgcccgcctcggcctcccaaagtgctaggtttacaggcgtgagccaccgtgcctggccttgttctctagatcttttagttgtgatgttatgttgttaacttgagatcttcctaactttttgatgtgaggctttagtgtcagaatgtagtgagatcagatgtattaagtaaggccaggcgtggtggccgattcctgcaatccctacacttctggaggccaacacgggagaatcacttgagcccaggagtttgagaccagactgggaaacatgtggaaaacttgtctgtaccgaaaatacaaaaattagccaggtgtgccagcacacacctgtgatttcagctacttgggaggctgaggtgggaggatcatctaagtctggggaggttgaggctgcagtaagccatgatggtgccactgcactccagcctgggtgacagagtgagaccctgtcaaaaacaaacaagcaagcaacagatattttatgcccttctctgggtaggaagcaaaatgaacagaactcagcattttaaaatttaaattttatttttgaattttaatctatttatttatgtattttgagatcaggttatgaaactggctaatttttgtattttgggttgagatgatgttttaccatgttgcccaggatggtctcgaactcctgggatgaagcgatgcacctgccttggcctcctaaagtactgggattacaggcgtgattcattgccaggttgcaattttttttttaatctcttgtctttctgagagtttcgtggcagagagtttggttcatttaagttcattctaaatagacatttaggacgttaacttctggcctcatggactctgaggttacaagtcccctggtctatcacaggaccatacacataagaaataaaaaaaaatcggctgggcgtggtggctcacgcctgtaatcccaacactttgggagactgaggcggctggatcacctgaggtcaggagtttgagaccagcctggccaacatggcgaaaccccgtgtctactaacaataaaaaattagccgggcgaggtggtgcgtgcctgtaataccagttcctcaggaggttgaggtactagaatcgcttgaacccgggaggcggagatggcagtgagccaagattgccccactgcactctagcctgggtgacaaagcaagactccgtctcaaaaaaaaaaaaaaaagactccaatcaaaaagcaaataagtaaataaacaaacataacgtttataataagtaattgtgttacaaagaaatatagttatgtcccctaaaccaaggtctcacagaaaaggaagcctgtgcacagactgggtcaactgtgtcttctctactgtccctacctcaaagttggcttcttccttgttgcctagaaaatcgtcgccctgactgggtatgattgttctttgatcagtatatgcatatatatgtattttttcattctttcctggctgattattgcgtgggtggttgtttggcgcctcctagcggccggctagcagtacaggcctcctccagaggccgcttgggctgacggcacggcttgtggcccacaggggcggccacctttctagagttctcttgtcctctggagctccagtggcagctgccgagggagggacagcccccgctgtgagctgagcagagctcgggagtcctgcagacttcagcagaacagtcccgatggtgccagagctctggcgcgtcccttgtgagtcatagctctggcgtgtagggctgtggaggggaggctgttaccgtgctcccggcatgagcttagtgtggggctgcccgggctggtccccagctcaccgcagctgcggaggcccgaccctcggaacccaccaggcatgatgcagggggccggggacaccccccaggcccggttgcgggcccatgtgtgtcctggccgtttgaggctctggccgatttcttttcccaagtccccatggagaatcagggaccgtcctgtgccatcttccgagagcctggaagggtccgcccgtgggctttccgagcgccgaaggggccacatgctgctctgagggtgccgcaggttcgtggggctcccttgcttggtgtccaccccctctggtttcctcctcttcccaccctgcgggtggctcgtcgccctggctgggacgccgctgtgggagcgtggtgggatggctgaggcgcgggcgtcagagggtgtggcccggcagcccccgtttcaggggtggctgtgtggtctggaagtggcggtccaggtcctgggcctctcccactcagcagcggggaggaggggtcggcggggagtaggggccggtcgcccccccttgagctcttccccgtcttagtggaccagcagacagtgtgggagagcgctgggaaggaaggttggcggagttatactccagacggacgggctcaggccccgcgcgccacactcggccacacttggcgcgtagtgtggacccggtgggcctctgccctcgccaccggctggcttctctgtccagccgctgggtcgaccagatgtcagccccaaggttagggtttggcctccagcttgagatgtttaagacggactagatagctctcgcccgcggcagtaccgcttaggtccagcagagggtgcgattacggctcacgcgccctccacctgcccggactcacccaggtcatcctcccttttcttttttcttttcttttctctcttctcttctcttctcttctcttctcttctcttctcttctcttctcttctcttctcttctcttctcttctctttctctttctgtctgtttttctttctttgagttttcgctcttgttgcccaggctggggtgcaatggggcaatctcggcttactgcaacctccacctcccgagttcaagcgattctcccgcctcagcctcctgagtagctgggattacaggcgtgcgccaccacacccagctaattttgtatttgtagtagagatggggtctccatgttggtcaggctggtctggaactcccgacctcaggtgattcgtccaccttggcctcccaaagcactgggattacaggtgtgagccaccatgcccggccccatcctcctgtttctgcctccagagtagctgaggctcgggatctttctgggtttttttttctttttttctagccccactttgagtttgtttccacggtacattgagttactattgttttgttttgttttgttttctctcttaagcaccttcctgcacactgaagttgctgttttaaatttcttctttcatacgtgtgtgtgtgtgtgtgtgtgtgtgtatgtttttttaaatgaggtcttcttagtcacccaggctgaagtgcaggtgtgtgatcacagctcactgcagcctggacctccttgggctcaggggatcctccgtcttagttctcccagtagctggtactacagtcacgtaccaccacactggctctttattttgcattttttactttttatttttgtagaaatgaggttctgccatgtttctcagactggtctcgaactcctgtgatcaagcaatccaccagccttgacctcccaaagtgctgggattacaggcatgcaccatcctgcctggctggctggctatctatctatctatctgtctatcatctctctctgtctgtccagctctgtctatctggctggctctgtctctgtctttctgatctatctatctatcatcttttttttttttttttttttttttttgagacaatctcacactgtcacccaggctggagtgcagtggcatgatctcagctcactgcaacctccacctcctgggttcaagtgattctcctgcctcagcctcccgagtagctgggactacaggtgtgcgccaccacgcccagctaatttttgtgtttttagtagagatggggttttacaatgttggccaggatgatctcgatctcttgaccttgtgatccgcccacctcagcctcccaaagttctgggattacaggcgtgagccactggcacccagcctgtatcatctttttagtagagatgtgatcttgctatgttgtccatgctctggatatatatttcttttttaactttaattattattttttaatagagatgctgtctcaccatgttggccccggatagtcttggactcctgggttccaggtatcctccgtggcctccaaaagtgctgggattacaggtgtgagccactgtgcacggtctggtcatgtttttgatgtgttgattctttccagtccagatgcataatctcatgtctgaacattcctgctggtgtcattatgacatatgactttacccagcaccagagtgatttggtgcccctgccctggcctagcccatggaagggattgtgacatatccctggacccagtaccgaggtggtgtgactattctactgccttggcactacccacaggggacattttgacatcactacatcttgtacccaggtggtgtgaatcttctctccagccttggctcttccacaggggacattgtgtcatatggctgggccccacacataggttatatgactctcctgcctgtgccctgcccatgtgggccactgtgacttttgctgagtccaacacccaggtgatgtaactctactgcctaggtcctgcctacagaagatcttgtgacatatccctgcacccatcacacaggtaatatggctctcttctcctgcctggctcctgcttacagaagggattgtgatgtattactgggctcagcacctagctcacatgactctctgcctctttctttctaggttctgcccaaagaggatattgtgacatgtcactgggcctaatactatgctgacatactcttttttttttttttttttttttttattgatcattcttgggtgtttctcgcagagggggatttggcagggtcataggacaatagtggagggaaggtcagcagataaacaagtgaacaaaggtctctggttttcctaggcagaggaccctgtggccttccgcagtgtttgtgtccctgggtacttgagattagggagtggtgatgactcttaacgagcatgctgccttcaagcatctgtttaacaaagcacatcttgcaccgcccttaatccatttaaccctgagtggacacagcacatgtttcagagagcacagagttgggggtaaggtcatagatcaacaggatcccaaggcagaagaatttttcttagtacagagcaaaatgaaaagtctcccatgtctaattctttctacacagacacagcaaccatctgatttctcaatcttttccccacctttcccccttttctattccacaaaaccgccattgtcgtcatggcccattctcaatgagctgttgggtacacctcccagacggggtggtggccgggcagaggggctcctcacttcccagtaggggcggccgggcagaggcgcccctcacctcccggacggggcggctggcctggcgggggctgacccccacctccctcccggacagtgtggctgctgggcggagacgctcctcacctcccagacggggtggctgccgggcggaggggctcctcacttctcagacggggaggctgccgggcggaggggctcctcacttctcagacggggcggttgccaggcagagggtctcctcacttctcagacagggcggccgggcagagacgctcctcacctcccagacggggtcgcggccgggcagaggcgctcctcacatcctagacgggatgacggctgggcagagacgctcctcactttccagactgggcagccaggcagaggggctcctcacatcccagacgatgggcggccaggcagagatgcgcctctcttcccagacggtgtggcggccaggcagaggctgcaatctctgcactttgggaggccaaggcaggcggctgggaggtggaggttgcagcgagccgagatcacgccactgcactccagcctgggcaccattgagcactgagtgaacgagactctgtctgcaatcccggcacctcgggaggccgagggtggcggatcactggcggttaggagctggagaccagcccggccaacacagcgaaaccccgtctccaccaaaaaaacacgaaaactagtcaggcgtggcggcacgcgcctggaatcgcaggcactcggcaggctgaggcaggagaatcaggcagggaggttgcagtgagccgagatggcagcagtctatgctgacatactcttatgccttgacactgcccctagaaggcatggtgattgattgctgggcccagaaccaatgtgatgtgagtctcctgcctggaccctgcctacaaggtgcattgtgacatatctctgggacctttaactattttatgtgactctcctctcttacctggatgttgcccaaaaagagattgtgacataaatttgggcccaacacataggtgatgtgactctcctctcctgcctcttccttgcccactgaagagtgaatgacttattgctgaattcagcacacaagtgatgggattcttctgcctgctcacagaagtcattgtgacatatatctgggcctatcactgaggttatgtgactcttttcttcctggaacctgtccacagtggggagtgtcacatgttgcttggctcagaacctacatgatgtgattctcttcttatgcctgggccctgcccactggagtgattttgacatgtagctgggcccagccccaaggttatgtgactccacacatcttcctgagccctacccacagggggcattgtgtcatatctctgagaccttcaatgaggtgatgcgactcttttgtttgggccctcttctcaggatattgtgacattgctgagcccagcatctaggtgatgtgactcttctctactgtttggtctctacccaaaaagggattgtgacatatcactctgtcaagaacctagaagaggtgactctcctctccagcctgggacctccatacagtgtgtattgagacatatcactgggtccaacacctagataacgcaactctcctgcatggggcctgcccataggggtattatgagccatctttctattaatcacctaggtgatgtgacactcctcttttgcctgggccctgccaaaaaagtattgttacatatcactgagcccagcagctaggtgatatgactcttctctcatgcatgggccctgcaaactggggtgtttgttacatatagctgggcccagcccctaggtcatgcgattcttttttttcctgagccctacccacagtgaaaactttgacatatttttgggcccatcatttatgtgatgtgactcttgcatgggccctccccacaaggggtagggtgacatattgctgaacccagtacgtaggtgatgtgactctcctttatggattgggctttgcccaagcagggattgtgatgtatttctgggcccaccacctagctgttgtgattcttctcttctgcctaagccctgcatacattgtgtattgtgacatatacctggattcagcacccaggtgatgcaactttatgtcatgagaactgcctacagaagtattatgacatatctctttttctttttcttttttttgagacagaattcgctcttgttgcccaggctggagtgcaatggtgtgatcttggctcacggcaaactccacctcccgggttcaagtgattctcctgcctcagcctcccgagtagctgggattacaggcatgtgccaccatgcccagctaattttttatttttttttagtagagacggggtttctccatgctggtcaggctggtctcaaactcccagcctcaggtgattcgcccactgtggcctccaaaagtgctgggattatgggcatgagccactgtgcctggccgacatacctctttttcatcacctagatgatgtgaccattttattttccatgtccctggcatattttgggtatagtgacatatcattgagttcaacacccattggatggggttatctgggagatttaattcccctcttctgtctgcaccctgaccactagggattgtgacgaatcactggtctcagcaatcaggggatttgttttttttgcctggtcctcgcccacagagaacattgtaacatatctctggtctcagcactcaggtgatgtgactcttctgactgtattctgctttcaggaggggattgtagcatattcctaatggagcaccaaggtgatgtgacactgctgcctggtccctgccctcagagaagattgtgacatatcactgccccgaaacccaggtgatgtgagtctactggtcggtccctattcactggtgggattatgatgcatatcttggcccagcttacaggtgcaatgattgctttcataccttgaaacaaccaatagcagatacactgtctctcatagccagagttaggaaaatgggtaatatcttgggtctcctcttcgtgtgaaagtcatggagaatctctcacatactgtgtaaagttgtcaaaaggtacagcggatgtcctaacagaactcagcacacaggtgaggttgtgacactcatatgtatgacctgccaacagtaaatatttcatccttccatataaacatagctcacaattcagattctgaatatcacacccagaggcagtcaaatgttggaaaatggaatctcatatgtgaattcgctccatgcgggggttggcatctttcagaccaagattcggcacacctgtgagtctgtgactccactaaggggacacagtttgcaggagggattgaggttcttatacatggatccagaccatcattgagattgtgactcatttacttagactcaacatacaggaagtgttagatctcatacctagaacaagaaaatgtgtggaattgttaatcttatgcttcgaccttcatgcaggtgtgattgttacatacacctctgcccagcacctgagtgatttgactcttctgcttgggcccagcgtacagatgggattgtgccgcattgctggacccagcacttaggtgatgtgagtctattctcttgccttattgcttttcacggagggcattgagacatcactgggcctagtgcccaggtgacgtgactttcctctacttcctgggcttttcccaagaagggattgtaatatattgctgggaccagaacctaggtgatgtgactctcctctcctgcctggttcctcttgcacatattgtgacatgtggctggtcctgataccttggtgatgtgactctcctgcatgggacttgcccacagaggtattacaacatatattttcattcatcatctaggtgatataattctcctcttctgcctggccctgccaaaaagtgggagattatggcaaatcactgaacccagcacctaggtgatgtgactctcttgtttggcctgggcctctcatgttttgggtattgtaaaatatcactaggcccaccacctatgggattgcatgctcctaccttggctttgcccacagggaccttgtgacatatatctgcacccatgacctagaagatgtgacatttattttttgcctgcaccctgccctgcacaggaatgattgtgacatatccttggaaccagacaccaggtgatgtggctcttctgcctctgtcttgcccacagggagcattgtaacatagcgctgagctcagcacccaggtgatgtgactctgttgcctgtgctgtgctttcaggacagaattgtaacatatccctggctgagcactcaggtgatgtgacactcctgcttggcttcttccctcagcagattatgagatatccatggctgaaatccaggtgatgtgactcccctgctagctcccttcttataagtagaattgcgacataggctgtggtcagcttacaagtgtgatgatgactctcatgtcagcttacaaatgtcatgatgactctcatgcctcaagtcagctattagaagaaatactggccaggcacggtgggtggatcacctgaggtcaggagttcgagaccagcctgaccaacatggagaaaccccttctctactaaaaatacaaaaaaaattagccgggcgtggtggcgcatgcctgtaatcccagctacttgggaggctgaggcaggagaatcgttccattgcactccagcctgggcaacaagagcgaaactctatctaaaaaaaaaaaagaagaagaaatacctttcatagctcagaaaaatgagcgacatcctgggtctctctttgtatgaaggttataaaagattgccacacccccacacgtagtataatgccctcaagtgttagagtgtgtcatcacagggcacagcaaacctcaccaaccattagtattatcaccctcacacatggaaagagcccgctgctgaggtcttgaatctcacatgcaaacagtccacagttggaattgtgactgtcatatgtgagcatccagccacagttgggatggtgacacatttctaaactcaaaatcataggcagatgaggtctctactatttggatccagccaattggagaaatgttgactctcacacctgggcttagggccacaggtatggtcatgggggcatataaacatgaaggggtcagagtgaattgtgacccacattcatactacataaagccccttgggtagtatagagagtgtattaacaaggcccagcacacaggggagatgttgacagttgtatgtacacccacccaacagtatacatcatcatttccccacatgaacacagcccacttctggggttctgaatctcacacctataggcagtcaaaggctggaaacttgactctcatgtggattcagtccacaggtgggttggtgacattcagagcaagattcagcacacctatgtggctgtgactttactatttatacgtggcgtgcagaaggagttgaggctgttgtgcacaagttcaatccaccgttgagattgtaactcctgttcttagacacaacatataggaggttaacaccgggacatgtgtgggattgttaatgtcatccctggaccttcctgcagttttaactgtgacatttttcttttcttttttttttttttgagatggagtttcactcttatcacccaggctggagtgcaatggcacaatcttggctcactgcaacctccgccttccgggttcaagtgattctcctgcctcagcctccgagtagctgggattacaggcatgtgccaccacgcagggctaattttgtatttttagtagagacagggcttctccatgttggtcaggctggtctcaaactcctgacctcaggtgatccacccgcctcggcctcccaaagtgctgggattacaggcgtgagccaccgtgcccggcccaattgtgacatttttctatgccaggcacctgagtgatctgactgtcttgtctgggaccagcccacaggtgggatagttctgctgaacccagaactgaggggatgtgactcttcttctgtcttggtgctgctcgtagaggacattgtgacatctcactgaaccttgcacttagttgatgtgagtctcctctcctgccttggcactgcctactggggcattgtgacatatctctgggcctacatccaggttatatgactctcatgcctgtgccctcaccacattgtgacatattgctgggtccaacaccctggtaatgtaactctactgccaacaaggaacattgtggtatttttttcacccattacccaggtgatgtgactctcttcttttgcgttgttctgctcacagggggaattgtgacatatcacttggcccagtaccaagcaagtgtgactgttctattcatcataagtcctgctttcaagggagattgggacatattgtggggctcaacaccaatgtgacattactgttttgccttggcccagaccttaaaggcactgtgacgtattgctcggctcagcaacaaggtgacgagagatcctgtgtggacattgacaacagagagcattgtgacatatctttgggagcatcagctatttgatgtgactctccttttataccaaggctttgctcataggggagaccgtgatgtatcttctggcccagaaatcaggcgatgtgtttctcctgcctgagctttgctcacagggagcattgtgacatatcactgagcccagcacccaggtgatgggactctactgcctgtcccctgctttcaggaggaaattgtaacatatctctgaccaagcacccaggtgataagtcttctgcctggtgcctgttctcagggaagattgtgacatatccctggcccagcaaccagatgatgcagatgacgtatctctcctgctcactctctatccacaggtaagattatgacatataatcacgcccagctaatttttgccttttaatagagaaggggtttcgccatgttggccaggctagtctcgaattcctgacctcaggtgatctgcccaccttggcctcccaaagtgctcagattacaggcgtgagccatggtcgctggcctagggagtgtgactttctttttgctgcctgttctctactcaacggggtaattgtgacatattgctggtcccagctcctagctgatgtgactgttttctttttcctaggttctgcccacaaaggagattgtggcatactgctgggcctaacactaaggtgatgttacttctctgctttggctatgtccttagaaggcattgagacacactgctgggcccagcaccaagatgatgtgagtcctctgcctgaaccctgaccacagggagcattgtgacatatttcttgacccactgcaatctctcctatggacaaagcccaggtaaatgccctattttacctatgtgatgtgacactcctcttctgcctgggccaagcacaccagtgatgtaattattctgcctgttccctgcacacaggagtcactgtgctatatatttgggcccatcacctagatgatatgactctcctcttccagggtttgtcctcagtgagaattgtgatatatcgcttgacgtagcttctatgtgatgtggctcttctctcatgcctggtcccttccctctggggtgattggaacataaagctgatccccacagctacgtaatgtgactttcctgtttataagccctacccacagggggcattgtgacatatctaggcctctcacctaggtaatatgacatttatgcctagggggtattgtgaaatattactggaccaagaacttaggggcccacaggaggcctttgttacatatctgtgcatccattactttggaggtgtgactctcttccatctgcaccatgcccatacagaaaattgtgacacatctctgggttcagcaaccaggtggtatatcttttgtgcccaggccttgcctgcagagagacatagctgggcccactacccaagtgatgtgactttgatgactgtgccttgctttcaggagggaattttagggcaacagaaccctggccaggcaaccaggcgatatgcctggtttcttccctggaaaaattgtgatatattcctgacccagcacccaggcgatgttattctctcatttgctttctactcacaggttggattgtgacatatactttagcccagctcacagttgtgataatgacactcatactgacaaatcagtcagtaggagagatactggcacttgtagctaaacttagagaaacaggtaaattattggggtcttctctaggtaagaacattataaagcataaccattctttcacagtttgtataaagtctttggatggtacagagtgtcatcacagggtcaagcacacaggtgagactgtgtttctcatatgaacaacctaccaaatgttggcaaacctaccaacaccctcacacatggacagagctcactggaaagatcctgaatttcacacgtggatgcagtccacagtaaaaattgtgactgtcatatgtgatcatgtgaccacagtcaagatgttgactcatttcaaaacaaagctcataggcagatgaggactcttctctctggtcctagccaattagagagatgttgactctaacacatgggcttaggtccatagctacgattatcagttcatactagaacagaattctcagagcaaattgtgactatcatgcatattgtataaagccctcagatggtaacagagagttttgtaacagggcccagcacacaggtgacattgtgatactcatacacacactcagccaacagtaaagattgtcatcttttcatatgaacacagttcattgttgaagttctgaatctcacacctagagatagccaaaagttggaaaattgactttcacacatggattcagtccacatgtgggctggtgactctcagaccaagattcagcgtatctgtgaggctgtgagtccactaaggggacacagtccactgcaaagattgaggctgtcatgcaggtatccagtccaccattgagattgtgacttgtgtattcagactcaacatacaaaaggtgttgactctaatacctagaaatgggacatgtgtggaattgttaatttttttttttttttttttgagacggagtttcaatcttgttgcccaggctggagtgtaatggtgcgatctcggttcactgcaacctctgcctcctgggttcaagcgattctcctacctcagcctcctgagtagctgggattacaggtgcccaccacaatgcctggctaattttttgtatttttagtagagatggggtttcaccatgttggccaggctggtcttgaactcctgacctcatgtgatccacctgcctgtctcccaaagtgctgggattacaggtgtgagccaccacacccagcaggattgttaattttatccctaccttttccttcaactgtgactgtaacatacacctctgcccagcacctgagtgatttgacttttctgcttggtgcctagtccacagatcagattgtgatacattgctggacctaacactaggtggtgcgactctgtacttttgccttggcactgcccacatgggacattgtgacatatcactgggcccctcaccctggttatgtgactctcctacctgtgccctgccttcatgggtcattgtgacatattgccatttgcaacatccaggttatgtaactctccttgctgggtcctgcctacaggaagctttatgatctatctgtgtattcatcatccaggtaacgtgactctttctcccaggtccctgttcaaagaaaggattgttacttatcaatgggcccagtgccttagctgatatgactcttctacctatattctgcttacagtgtacattgtgacatactgctgggctgaacaccaaggtgatgttacatttttgccttggcgtttcttttcatcaagcattgtgacatattgttgggctcagaaccaaggtgatgtgatccttctgcctgaaccttgctcaagagtcaacaccttttgcccaacaagaatagtgacatatttgtgaatccatcgtctatgtgatgtgactctcttacttggatttttcctataggagagattgtgacatatcacagggcccagcatctagataatgtgacgcttctttccttccatggccatgctcccataaaagagagtgacttatccctgggatcagcccacaggctatgtaattgttctgcctagtccctgtctacaggggttattgtgacatatctcttggtcccgttcttcttctccctgggacttgtccacagtgggaattgtgacatatcacttggcccagcacctatgtgatgtgactcttttctcatgctttggccctgcccactggttggttgtgatatgtagttgggcccagctcttaagtcaggtgatctttctcttcctcctgagccctactctcccaagaccagctaggtcatggagaccctaacccagcggagctagaggaattaaagacacacacacatagaaatatagcatgtggagtgggaagtcaggggtctcacagccttcagaactgagagcctcaaacagagatttacccacatatttattgacagcaagccagtgataagcattgtttctatagattacagattaaaagtatttcttgtgggaaataaagggatgggctctggctagttatctgcagcaggaacatgtccttaaggcacagatctcacaagctattgtttgtggtttaagaacgcgttaagcagttttctgccctgggtgggccagatgttccttgccctcattccagtaaaccaacaacctttcagcatgggtgtcatagccatcattaacaagtcacagtgccgcagagattttgtttatggccagttttggggcctgtttatggccagatttgggggcctgttcccaacactactcacaggggacattgtgacatatctctggggctctcatctagatgatgtgacttttctgccagggctcttttctcagaggatactgtgacatttcttgacctagaacctaggtgatgtgactctcttctgcttgggctctgcctgagatgtgacttttttttttcccctgggctttgcatacattgtgtattctgatatatgactgggtctaagacccaggtaatatgactctaactcatgggttctgttcagaagggtattatgacatatcatttgttcctcacttaggtgttatgactctcgtcttttcactggaacctgccaaaaagggtgattgtgacatatcactggacccagcaccttggtgatgtgactctcctctcctccttaggccctgcttacattgtgtctgttgaaatacggctggtccaacacctaggtaatgtgactctcctgcataggccttgctaataggggatgtatgacatatgttttgtttatcacttaagtgatgttactctccttttcttcctgaatcctgtaaaaggtgggggattgtgaccctatcactggacccagcacataagtaatatgagtttcctgcataggctctgttcagaagggtattatgacatatctttttgttcatcactttgtgacttgtcttttgactggaacctgccaaaaagggtgattgtgacatattgctggacccagcacctaggtgatgtggctctcctttttttctgggcctcacatattttgggtattgtgatgtatagctgggctcaacacctagcagttggggagctcctttcttgaccattcccacaaatgacatatctctgctatgaccgcctatgacacatgacctaaatatgtgacccttcttttctgcctgtaccctgctaacagagaagattgtgacaaattgctaagtgcattgtatcttgtgctaaccttctatctcagcctgtgaccaagaatgcctaactgccggggaatgcagccctgtaggtctcaacctcaatttgcccagccactattcaaaatagagtcactctggtttaaatgcctctgacattaagatacactgtaaaattatgaaaaaagttgatttgaattttagcaaatgagaaatgaaataattagaatgggctattctgaaagatatagcattagttatatttgtgtttgagttttctattaacctatatttgttacttatgaatagataccttgttttattctgtctaaacagatacactaggtggggtgcggtggccatgcctgtaatcccagcactttgggaggccgaggggagtggatcacctgaggtcaggaatttgggacaagcctgaccaacatggcaaaaccctgtctctactaaaaatacaaaaatcagctgaccatggtggcgggtgcctgtaatcccagctacttcagaggctgaggcaggagaattgcttgaacccgagaggtggaggttgcagtgagccaagatcatgccactgcattccaccctgggtgacagagcgagactctgtctcaaaaaataagaaaaaataagcggccgggcatgctggctcacgcctgtaatcccaacactttgggaggccgaggagggtggatcgcaaggtcaggagttcaagaccagcctggccaagatggtgaaaccctgtctctactaaaaatacaaaaattagccacgtgtgttggcaggtgcctgtaatcccagctactcgggaggctgaggcagagaattgcttgaacccaggaggcagagtttgcagtgagccgagatctcaccattgcactccagcctgggtgacagagggagattctgtctcaaaaaaaaaaaaaggacataaatttaatgttaagtgtggactcataaagaatctagacagccaccaagccatttgtttattcttgatttcttaaagcttccattattaaaagctctgcattccattactcatcacagaaaataatctaaattaaatatgaattaagtttgtgtgtgtgtgtgtgtgtgtgtgtgtgtgtgtgtgtgtgtgtggtgattattctaaattactaaacagattaaggccaatttttttatgtcaaacatataattctgagaaacaatcaatactttatgtacatttctgttacctaataggctatttaagcatttatacagaaattttatacagttgtcatttttaatgcatgttttctgatagtataaaagctttctcatgcaagaaggctgatgttataatagtagctaaaagaatattagaaaatatgtttttttttcatgggacatttctgaaaggtctctaatgatcaagatacttatttcactagacaagttgtaaaactgttaaataaggtattgttcctggaccaaactgagagttgggctgctatttctcatggcccaataacgagatgcagatgaactggggaggaagagagttttatttctgcaaccagttacagggagaaggcctggaaattatcaccagaccaactcaaaattacaacgttttccagagcctatataccttctaagctatatgtctacatgtaagtgtgcattcatctaaagagataagtgattaacttcttttatttaatctgtaactaaggtctgagtcttgaagaccttcccctgcagcctcagtaaatttacttaatctaaatgggtccaggtgctggggtaattacccttatcttgtctcctgctaaatcacagtggtttggtgaattccttcagacctccaataaacctgtttgtagaggcctggggaatttcttcagacccccaataaaacttgtttaatcctataaggcccaagaaaggcctaggcgaaactcttgatgggcttttgttacatcccagcctttgtataaggtcactggctttttttttttttttaattgagacggggtctcactctgtcaccaggctggagtgcagctgtacaatctcagctcactgcaaactccgcctccagggttcaagccatccttctgcctcagcctcccaaatagttgggactacaggcacatgccaccacgcccagctaatttttttgtatttttagtagagacggggtttcaccatgttggccaggatggtatcgatctcttgaccttgtgatccgcctgcctcggcctcccaaggtgctgggattataggtgtgagccactgcgcccggctggtcactggcttttaatatttaacttaaccactcagtcagtactgaaacagttgttagtgaggtctggcctgccacagtattacaggtacaatagtattgagcaaagctaactaaattgactggattgcttttgtaattgcagattgatgacaatcagattcacttagagtggaaaaagtatgttggcccttataaaatagtcattagaaggcctatgtgcgtaatagaacctcatgtgtcttctgctactaaagtctaacattactaaattcaacaaggctttaatgcattatggcaaagcacattttcaccaggtgaggaaagcctttactagtctactgactgaggagagtaaaaccctttataatcaagaacccagagattgaatctgcctgccacctacactgacgcaagacttcaagaccttgaacattggattgataatctcacaacttagaagggcccctccaaactcttgaaattgtaaacccataggagattttaaggtaaagctaaccaggaaagtttgtcctcaaaagcagatggccgtctccatgtagatagcttttttcacaagatcaaaaatcaagacatctcgttatcatgacactcttagttcacagtttgtttatggttctacaaaccacagaaattttaaaaagtggtctcttgtgtgcactcatgggggtatacttatatgtagagaattttgcagccaacattatgtatgaggaaacttattccttgaaaggtaaaagaagaagggccaatgtaggtgagaagttttaatgaaacatttgttttctcacaatatcaaaaacagaatattggtccactgctcttaacctatttcataagttaaaaagaacttattcagaataggttaaagagcattgccaggaggccattactcttctgaatgggtatcactgtttagagtaaatgaggcaatggttacaaatttatccctctcaatagggctctatagcagattataccataaaaactatgcttacacaatagactttaagttttctcacaaagttatgctaaatataatttcttttgattacttactggataaatagatatctgtgcagttgctaatagttgcccatggagaactacagccggtattacagagatgcagttgtagatgattcatgaacaggctgattagatgaaatgagtagatcatttatctagctaactatttgatctatttaactttaattggttgttcatggggaccctggctaaaaagcatgcttcaaactcttggtattatcctcctgatagtcaaaatggtaatcttcctactgcactgtattctctcaaaagatgtaaacgtttgaatgtagtcatctgtagaatgtcaaatggtctctctttaactggaatgacagaaactcaaagacatatgtgactatgaagacagcacaacctatgaatgacatgctaaggacaaaaaacaaaaataatggaaactgagagtggcactaaagccccgagttttggttacactgtgacctatgtaagaacttaaccaaacggggaattttttaaagaaaactattggaggccataattctggactgagcttatgcactaggtccaaacaaaccaaaccaaaatgagtcactcatgctggatgtgacataattaaactaaaaatttaaggcaacaggtagattctaaaactggccaggttttgtttttcttctctaaatagcagatttcaacacaaggaggtcccctgtactctaacactttaaaaaacaaataaaaataatttcaaaataataagctgaagtttttatttccactttacaaacccacagttctgctgtttcacagtgagattcgagtctaaataagtacatttttgatggtgacaaagtgatattaatgtctaaagttttggtctcaaacttgagaagatgacaaaagggagaaattgttaaattagttgtagcctaaagcttccctcttatgtttaattttggctaataggatttgttttttgttttttgtttttttacatagtaaacttaatgttcaaatgggacatatcttaagctgtaataaatctggctgtttctgtacctcacttccattttctgtatgtcattttgcttttctggttcataaaaattttaccaacatgtggctgtgttggagtctctctgagcctactctggatccataggttacccgatttgcaaatcatgatttgctcatttaaactgttaaatttaatttttctaaagttttcttcttttacaaattttcaaattttttatgatgaaaataaataatgttattgagctttgattttctaaaatcatcccacagctattttcccaaataataataatataataataaataataatacaataatttcccaaataataataaaaatagtgaaaaggcagctgatgatacatgtctgaaggacctcagttgagcccagcctaaatggctgaccatctcaattacgagcaaataagttttggatggtttgttatgctgcaatagctaactaatacatgcaccctgtgcagatggaatgccaggatttaatgacaggttgattactagttaccttctgacagtggacaccctaaagatactgacttttcttttctttttttcccgatttgaagttggatgtctcctaagacaatgttgagtaatgcagaaatacaggtagacatgtatgtgtgtgattggtgcttatactcacacagtaccccacaccacaggaaaaaaacagataaccacagcctgaccattagagccaaggccaaacagcaaaataagtttgcctttaatttattttcttcatatctttttttttttttttttttttttttttccgagacggagtctcgctctgtcccccaggctggagtgcagtggcgcgatctcggctcgctgcaagctctgcctcccgggttcaagccattctcctgcctcagcctccagagtagctgggactacaggcgctcgccaccacgcccggctaattttttctattttttaagtagagacagggtttcaccgtgttagccaggatggtctcgatcttccgacctcgtgatccgcccacctcggcctcccaaagtgctgggattacaggcgtgagccaccgcgcccggccttcttcatatcttaaagttagaggttaagactgtggacagacccaaagacatagagttttcttctcctgtctcctgtggccccagaattttttgttcactgtctgatctctggatgaaaggtggacaacaggtggcaaagagtggtctacctgtggttattttatttgtgctgccctctgcccttgctatggccactatctatcgcaccctcagaaccgaagatagatgttagtagagagaggctgtctcctcacctctggcagaaaagggatgttcagggcctccacccacctgacatcagagctgcacttcaacgtggtggctgttggccatgtgtggctcctgggtgcctggaatgtgcctggtctgaactgcaatttgctagaaaagtaaaatacagagttggtttcgaagatttagttccaaaaatatatatagtgccttaataattacatattgctgtgaccccagaaaatctgagacatcagttaatttagaaagtttattttgccaaggttgagaacacgcctatgacatagtttcaggaagtcttgaggacacctgcccaaggtggtcagggaacatattggttttatacattttagggagacatgagacatcaatcaatatatgtaagaagtacattggttcagtctgaaaaggtgggacaacttgaagcaaaggcaggaagacacgaagctggagggagcttccaggtcacagataggtggactcaaattcttttgagtttctgattggcctttagttcccagcttgagttttccttagtaattttgggggcccaagatattttcctttcacattgctcacatattaaaattataatactttaaacatattgggttagttacattattacaatcaattccacgtgtttcatgtttctttttaaagtttggctactggaaaattaaaaattcacatgtggctcacattttatttcagaggactgcctcctttttaaaatctcaggctgcctgctcaaaggaccagaagctaggaaggtgataaaagctaaaatttaaaagtaattgttattatattcttttcatttgtgactagccatatagtatatttataaatgcatatgaccttacacacaaggttcaatgcaaacaccctctagggtgggcctggctcagctcggaggaaagcctgcctgaaaaggctgcagctaggctgtcacgcttcattctgcccagcaactgatcaccctctgtcactcagggcctgagagggcgggtcttaaacattatccaatcaggcacgcagctggagcgacaggacggtttccggaatatggcggggcgtttggctcttgctgcagccagagctccaggtctcgtcttcatttctgtgtcctttgttcttagaggcccagcctgtgtggccctgtgacccgcagatattgggagatacacagctaagactccaggaccccctggaagcctagaaatggtgagagtgccgagtctgacatccccagagagggggaggggctggtcggaaccgtgagaagtggccgtggcggacttaggtctcccggcagtcagctccacaatctgcgcccggaattctccttgcccagctcggcttcagtccccttcagccataagatggcgactgtgctgacagccgggccccgggcgtcctgtcttccctccgcagtgactgtgcctgacgtgtagccctgtctggggagctctgcacgcgcaattccgcagtctctcccagattgtgcaagaaccatgggaggggcgtcaggtgagaatagtgactcgggatgcgggttcatgagcgggaagagctttggtccgtggggttcccagttcccattctctcctattaaaaatctatgggagtggccgggcgcggtggcttatgcctgtaatcccagcagtttgctgggaggcgggcagatcactgaggtccggcattcgagaacagcctggccaacatggtgaaaccccctctctgctaaaaatacaaaaattagccggatgtggtggcaggcatctgtaatcccagctatgtgggaggctgaggcacgagaatcgcttaaacccaggagaccaagattgtgccattgcactccaggctggttgacacaatgagactatctcaaacaaaaaaaaaaaaaaaaaaggggagtcactgcaaaatattaaagaatttaattaaagagtggttctaaaattgtaaagcacccagctgtgggatgtagtttgtggtcctttggaggagcttgaaggaaagactttgcgcatggtacaaaaacgcaaattcagttattggttaggtagggttacgtagtttcttaatttccatcttcagcttacaaaatttcctggttatgtaatcagagcttaattccagttaatagttaaccctgtatttgttttccccagtgtagtaatttacaaaaaaaaaagcatttgagttagttttttgtttttttttttttttttttgagatggagtttccctcttcttgcccaatctggactgcagtggcgcgatctcggctcactgcaccttccgcctccgtgttcaagtaattctcctgcctcagcctcctgagtagctgggattataggcaggcaccaccacgcccggctaattttgtatttttagtagagacggggtttctccgtgttggtcaggcttgtcttgaactcccgacctcgggtgatccgcccatctcggcctcccaaagtgctgggattacaggcgtgagccacggctcccggcttgagttagatcttttaaaagtaggaattcagggactacagccacctcagtcgaattgcctaccacttaactattttcactccctacacaaaactgatcttcccctgcatttttcacaggtgtcctaagcagggtctcaaatctactcccacgccccccattcctccagcctaactctggcttgcagtaaaatacaaaatttccatttcctcctgacaatcccaaatgccaactcccactactccctaattcacactattaactatttgtcctttagtgtacatttttgatactgtattttaattaaacattttttgacaaagcattggatggcacatttaaaaagatttgttttctgtttataaatattttccataagaagaaagcaaggaataatcttctgacactgtattgtaaaaaaatctttgtctcttttccttttatcttccctaggcatagagattttatgagaatgttttggcatcaaggtttttcttggaatttttgtggggtgatgtgtcctcagccaccctttagtttttttcctggtcctgggttccagtactgtctgtgaataaaccaagatatcagtcatggctatgtctgcaagactgtctaatgaatattaattcctgggtcattttctcccataggacaacctgtggtatggagtgtagcctctgaagggagcaggtgtattccctggggctgagaggaatctcctggtgtacttttcgtttgaaaagctaaccccttcagatgttaagactgtgttcacccagcccgactttcctttctttgggccacattgctggtcacccaatcaaatgctggtattgagttgaaaacaaataatttctgaccccttgattctctacaatttgtgaaaaaagactagtatctctgccaggcacggtggctcacgcctgtaatcccagcactttgggaggccaaggtgggcagatcacctgaggtcaggagttcgagaccagcctagctaacatgatgaaattccgtctctactaaaaacagaaaattaaccaggcgtggtggtgcatgcctgtaatcccagctactcaggaggctgaggcagaagaactcgggaggcggaggttgcggtgagccgagatcgtgccattgcactccagcctgtgcaacacgagtgaaactccatctgaaaaaaaaaaaaaaggtgatatctcaaaagacaaaagaaaccctgaccccggtgagatgaggcgagaaattgcaaagtaaaatgcacttgggacacttactggaacatagagcagtctcctgagagggtggttattgagtacttaagtgacttaagtgagcgggatgggtaggagaatctctcaagtgattgaacttgacacatgagtcggacacatctgttttcttatcagcactgccactccctgggtttgtcactttgaaaagatttgttcacttatattgacttcagttttttaactctaaattgcaattttttagtagagcttgaaaggtaagaaaatatttacaaagcgcataaaagaggtgggcttcagaaaaatctatcttttttttttgttaaaaattctcatgtacctttttctttcttagagtgagtttagaaattttctcaggcttttttttttttatggctgggtgatttcaaacagaattccaaggcttagattttggaatgctaccaaggaaaagaatagggaaaaatctcttccattttggctgtagaaaatgaatgcatttccagaagaaaatgttgtagataataggtgagttacatgaattcatgaaaacatcagttgtttttgcaggataaatttctgacagtgaatatctctgttctatatcctgttatctttatttcagagtttaatgctgtattttttagatgaaacttggtgcctcctagaagtgttcccatatgactaattgtttactacattttttttttttttgaaatggagtcttgctcaaggctggggtgcagtggtgcgatcttggctcactgcaacttctgcctcctgggttcaagcaattctcctgcctcagcctcccgagtagctggaactacaggcgcacactgtcgcgccagcctatttttgtattttagtagagacagggtttcgccgtgttgcccaggcttgtctcgaactcctgagctctggcaatctgcccctcctaaagtgctaggattacaggcatgagccaccttgcccggcctactacatgattttttaatggaaataataaaataatacatttataaaggaatagatacttttgcttttcttattgaggtatgaaatgtaagcattgtaaaattgccttgttttatatgaacattgagtaattttgctggatttttcgaacacttagtttcaaagaccaagtgaataactctgacacggaaattaaaacttgagcccagtgactccaagctaaggctaatattgagcctgcaaaagaaggttatttaagatccagttagttctttctggggagcctcccctgcaggtgtccctgcctgctcaccccagccatggaaggaggctttatcctgagagaagctacagagccctggaaagctgggaacccacaggcagatacagttacagttaaggtggaagggaactgggaggatcttactgaagataaagttgtccttgttttgagacagtttttagactttgtaaagtagaacaaagttagatttgtataaaaaaaagaaaattgaattaccaaggagtattgcaacaggaggaaataccaaccataagagctttaaggattgcaaagtttaggcagacaaagcctttcttttctttttttaataatttttttttttttgagatggaatcttgctcttgttgcccaggcaggagtgcagtggcacgatctctgcttactgcaacctccacctcccgggttcaagcaattctcattactcagcctcccaagtagctgggattacaggtgcccgcgaccatgcccggctgacatttgtatttttagtagaggcggggtttcaccatgttggccaggctggtctcgaagtccttacctcaggtgatgacaagggctttctttcataggggtgagcaaacaagattagaaaaaagatgggaggggaacggcaaatggacggtaaaaacatcagattctagatcagagaatgttttatcctgaggtcagcatgttcttagaagggaagtagaatggggttgtatgttggctcagacggagggcagcccaaagtccaggaacctctgggaaggagataaatttcagcgaggtctgatatggaagtacaggaaagtggtcccaatccaggctccaagatagggttctttgatcacacgcaagaaagaatttagagtgagttcatagagtaaagtggaagcatgtttattaagaaaatagaggaataaaacaatggctacttcacagacatagcatcccagagggctgctggttgaccactttatggtaatttcttttttttaattttttaatttttttttattgatcattcttgggtgtttctcacagagggggatttggcagggtcataggacaatagtggagggaaggtcagcagataaacaagtgaacaaaggtctctggttttcctaggcagaggaccctgtggccttccgcagtgtttgtgtccctgggtacttgagattagggagtggtgatgactcttaacgagcatgctgccttcaagcatctgtttaacaaagcacatcttgcaccgcccttaatccattttaccctgagtggacacagcatatgtttcagagagcacagggttgggggtaaggtcatagatcaacaggatcccaaggcagaagaatttttcttagtacagaacaaaatgaaaagtctcccatgtctacttctttctacacagacacagcaaccatccgatttctcaatcttttccccacctttcccccttttctattccacaaaaccgccattgtcatcatgacccgttctcaatgagctgttgggtacacctcccagacggggtggtggccgggcagaggggctcctcacttcccagaaggggcggccaggcagaggagtcccccacctcccggatggggcggctggccgggcgggggctgaccccccacctccctcccggacggggcggctggcccggtggggggctgacccccacctccctcccagatggggtggctgccgggcggagacgctcctcactgcccagatgggacggctgccaggcggagggtctcctcacttctcagactgggcggccgggcagagacgctcctcacctcccagacagggtcacggccgggcagaggcgctcctcacatcccagacggggcagtggggcagaggcgctccccacatctcagacgatgggtggccaggcagagatgctcctcacttcctagatgggatggcagccgggaagaggcgctcctcacttcctagatgggatggcggctggacagagacgctcctcactttccagactgggcagccaggcagaggggctcctcacatcccagatgatgggcggccaggcagagacgctcctcacttcccagacggggtggcggccgggcagaggctgcaatctcggcactttgggaggccaaggcaggcggctggaaggtggaggttgtagcgagccgagatcacgccactgcactccagcctgggcaccattgaacactgagtgaatgagactccttctgcaatcccggcaccttgggaggctgaggctggcggatcactcacggttaggagctggagaccagcccggccaacacagcgaaaccccgtctccaccaaaaaaatacgaaaaccagtcaggcgtggcggtgcgcgcctggaatcgcaggcactcggcaggctgaggcaggagaatcaggcagggaggttgcagtgagctgagatggcagcagtacagtccagcttcggctcagcatcagagggagaccatggaaagagggagagggagaccgtggggagagggagagggagagcggtaatttcttgattatatgctaaacaaggggtgaattattcatgcctcccctttttagaccatacagagtaacttcctgatattgcattggcatttgtaaactgttatggcactgatgggagtgtggcagtgaggacaatcagaggttactctcagggccatcttggttttggtgggttttagctggctcctttactgccgtctgttttatcagcaaggtctttatgacctgtatcttgtgccaacctcttattatgcgacttagaatgccttaactgtgggccatgcgcggtaatttcagcactttggaaggctgaggcgggtggatcacctgaggtcaggagttcgagaccagcctgaccaacatgatgaaaccccatctctactaaaaaaaaatataaaaattagctgggcatggtggcgggcgcctgtaatcccagctacttgggagacagaggcaggagaatcacttgaaccggggaggtggtggttacagtgacccgagatcacgccactgcattctgcctgggcgacagagcaagactccatctcaaaaaaaaaaaaaaaaaaaaaaggaggaaagaatgccttaactgtttgggaatgcagcccaataggctctggtttaaatgcctctgacagaagtattttatttttaccactgaagtcaaattcagctaccatttttatgagagcaagaagaaaatgtgcagagtctatgtctggcttatgtgacaggtaagaatagagagcaccatctaagtcttttttttttttttgagatggagtctcactctgtcttgcacgctggagtgcagtggcgtgatctcggcttactgcaagctccgcctcctgggttcacaccattctcctgcctcagcctcccagtagctgggactacaggcgcctgccaccatgcccggctaattttttctatttttcagtagagacagggtttcactatgtcagccaggatggtctcgatctcctgacctcatgattcacccgcctcagcctccaaaagtgctgggtttacaggcatgagccactgcacccggcccttagtcttaatggtaatggggtttctttccataaactgtttctggcacacaaaggatagagaattttattaatcacagctgttttctcggattatccacgtgctttttattttcccacctcttttctttgtcctatacatttcttccatttgacttctcctggattttatcttttataataaaccagtaaacataactacagtgtttgctgagttctctgagtagctctgtccaattattaaacttcatagaggttatgaaagtcctgaatttttaaacagctcagaagcatagatgggcccatggggtttgtgactggcatctccagtaaggacaatgttgtgggaccaagccctgaatctgggtctctgctgactctgggtggtgtccaaattcaaatgttagacattgagttgctgttggagaattgcttggtgttaagcaaactctacagatttggtgccagaagaaagatatcacagaggcctgtcctggaataaaactcttggtatctggaaatgggaggctctgctctcctgtacacaggctttcacactgcccattgtcctgtgattccaggtgtcctcttagggtaagagaggatgaaaacttagagggaacgatctctgatgacagactcccttttcctgcagctgccaccacgtgattcccacccactcacatacacacccactagacattgacatgtccacatccctcccagaatgaagcaccaccctcaggaacttcaccacagcatttttgatcccagtgttccttcccagaaatgcacaaaagtgtctacaagtctcctggaatattcctactcccagacacaatctgcaacagcaacctgtttttctccaccaacttagggttctgggccacctgtttgtaatctcatctgcctccatggacctagaaataaatcagtacagccccacctggaccattatctgtagcacaaaccagtcttttcacctacatagtactctcccccaactaatgaagttttttccttttaacttttatttttggtctaggggtacacatgcaggtttatcatatagataaaattgtgtcatggaagtttagtgtagattattttgtcactgaggtactaagcatagcatcaaacaggtatttcttattctctttgtcctcctaccctccaccctcaactaggcctcagtgcttgttgttcctctctttgtgtccatatgtgcttgttatttagctcttataaatgagaacatgcatttggtttcttttttctgcattagttttctgaggataatgggcttcacctccattcatgttgctgcaaaggacatgatcttgttcttttttttttaaataaccacacagcattccgtgatgtttatataccatgtatattttatacacacacacacacatatatatatttttttattttatttttgagatagagtctaggtctgttacccaggctggagtgcagttttacaatctgggctcactgcaacctccacctcccagattcaagtgatttctcctgcctcagcctcccaagtagctgggatcacaggcacgcaccaccacacccagctaatttttgtatttttagtagagacggggttttgccatgttggccaggcttgtctcgaactcctgacctcaagtgatctgcccacctcagcctcccaaagtgctgggattacaggcatgagccactgtgcctggccaccatatatatttttatttttttaaattattttattttgttttatttcattttattttttgagatggtgtctcactctgtcacccaggctggagtgcagtggcgtgatccccgctcactgcagcctccacctcccagattcaagtgattctcctgcctcagcctcccaagtagctgggattacaggcatgcaccaccacgcttgtctaatttttgtatttttagtagagacagggtttctccatgttggccagactggtctcgaactcctgacctgaagtgatccccgtaccttggcctcccaaagtgctgggattacaactgtgagccactgtgcctggcctttttttttttttttttttacttttttatagtagccattctgactggtgtgagatggtatctcattgtgatttttctttgcatttctctactgattagtgataagaaagaaatactcatcaaatgcttgttagccacatgtatatcttctttagaatggcatctattcatgttttttgcctactttttaataaggttgttttttcttgtaaatttgtttaagttccttttgaattctggatattagacctttgtcagaagcatagtttgcaaatattttcttctattctgtagattgtctgtttactctgatttttttttgtgtgtggtgttttttgttttttgtttttttgctgtgaaaaagctctttaattaggttgcattcatcaaattttgcttttgttgcaattgcttttggtatcttcatcataaaactttgccagttcctatgtctagaatggtatttcctaggtcatcttccagtattttttaagtctttacttaatcttgagtatatttttgtatatagtataagaaaggggtgctgtttcagtcttctacataatgttagctagttattctagcactatttattaaacagaaaattcttcttacgttcctcttgtcagctttgtcaaatatcagatggtcgtaggtgtgcagcattatttctgggctctctattctgttgcattggtctatgagtctgcttttgtaccagtaccatgctgctttggtttctatcaccctgcaatatagtttgaagtggggtaaagtgatacagtgcctccagctttgttttttgtttttttgtttttttaaatttttttattttttttattttattgagacctagtctcgcttaattccccaggctggagtgcagtggagcaatcttggctcactgcaacctctgcctcctgggttcaagcaattctcctgcctcagccccccaagtagctgggactacaagcatgtgccactatgctctgctatcatcatcattattattattattattgtatttttagtagggacggggtttcaccgtgttagccaggatggcttcaatcccctgaccttgtgatccacccgcctcagcctcccaaagtgctgggattacaggtgtgagccaccatgcccagccgctttgttctttttgcttaggattgcattggctcttcgggctttttttgttgttccatatgaatttaaaaacagtttttagttgtgttaagaatgtttttggtagtttgatagaaatggcattatttctgtatatttctttgagcagtatggttattttaatgatactgatttttttctgtccttgagcataaagtagtttttgatttgtttgtgttagttctgacttctttaagaagtgttttgtagttcttgtcgtagagatttttcaccaccctggttagctgtatttctagatattctattctttttgtggcagttgtgaatggaattatgtttttgatttggtttttggctcagatattgtggatgtgcagagatgctgctgatttttgtacatgtattttgtatcctgaaactttgctgaagttgtttttcagtctaaagagcttttgcaccaagactatagggttttctagatatagaatcatgtcatctgcaaacagggttagtttcctttcctctcttcctgttgggatgcctgttatttatttctcttgcctgattgctctagccaggacttccaattctatgttgaataaaagtagtgagagaagtcatccttttcttgtgccagtttttaagaagaaatgcttccagcttgcgtccattcagcaggttggctgttgatttgtcacagatatcttactattttgaagtatgtaccttcaatgcctggtttgtttagggttctaaacatgaagaatgttacattttattgaaagctttatctacgtctattgagataatcttgtgttttttgtctttagttctgtttatgtgatgaatcacatttattgacttgtgtatgttgaacccaccttgcatcccagggataaagcctacttgatcatagcagattagcttgttgatgtgctgctggattcaattttacagtatttcattgaggatttttgcatcagtgttcatgaagaatttttgcctgagttttcttttttttgttttatgtttgccaggttttggtatcagaatgatgctgttactatataatgagcaggggaagagtttcttctcaatttttttagtagttttagaaagtataataccagcttttctttgtacatctagtagaattcagctgtgaatctgtgggtcctaggctttttttggctggtaggctatttactaattcaattttagagcttgttattgttctgttctgggctccagtttctttctgtttggtattgggagaatgtatttgcccagaaatttatccatttcttttagattttttttttagtttgtgtgcatagagatgtttatagtagacttcagtagttatttgtatttttgtggggtcagtagtaatgacccttttgtcatttcctttttttttttttttgatatggagtcttgctctgtcacccaggctggagtacagtggctcgatctcagctcactgcaagctccgtctcccaggttcacgccattcacctgcctctgcctcctgagtagatgggactacgggcacccgccaccatgcctggctaatttttttttatattcttagtagagacagggtatagccaggatggtctcttatctcctgaccttgtgatccacccacctcggcctcccaaagtgctgggattacaggcattgtcatttcttattgtgtttatttgaatcttctcttcttacttcactaaacttgctagtggtttatcttattgatttatttaaaagatttaactcctggatttcttgatcttttgtatgacttcttatgtctaaatctccttcagttctgatctgattttggttatttcttgtcttctgctagctcaggggctggtttgctcttgcttctcttatacttttatttatgatgttaggttgttaaattgagatctttctacctttttcatgtgagcatttagtgctgtaaattccccttttaacctcacattagctgtgttggagagattctggtggtgtgttgtatcactgttctcatttgttttaaagaacttcttgatttgtgccttaatttcattatttacccaaaagtcattcagatgaagattgtttaattttcatgtaattgcatgttttcaagtgtttttctttgtactgaattatatctttttttttctttttttgagatggagtcttgctctgtcgcccaggctggagtgcatggcaccatctcggctcacagcaacttccacctcccgggttcaagtgattctcctgcctcagcctcctgagtagctgggactacagatgtgcaccaccacgcccagctaaatttttatttttttatttttagtagagaaagggtttcactgtgttagccaggatagtctcgatctcctgacatcgtgatctgcccacctcagccttccaaagtgctgggattacaggcatgagccatcgtgcccagccctgtattatatctttatctttatcaagttgtggtctaagtgagcatttggtatgattttgggattattgaatttgctgaggattgttgtgtttctgattgcgtggtcaattttagagtatgtgacacatggtgatgagaaagatatatatactatgttggtttcagatgaagagtttcatatatgtttattagaatgatttggtcaagtgttgagtttaggttctgatatctgctaattttctgcctcaaggtgggaaattaaagaaaataaaattaaattaaaaagagaaagaaacaaggtttcctgtattaggctgacttatcctagaggcagtaacaggcacagcccacatccaggaaaagttttgataacactatttaagaagccagggctggaaagaatgtgctctggagactctcccagcattccctcaacatagggagaagagaaacaaattttcctttctcttatgattcctgtttttcatttaagcagcacattgaaggtcatgagatgcctgagcaggcctggattgcagccacctaggcaccatagtgaaggttataagataagcccatgcaaggcactagagcaagcctaggtaacagccatctgggccacatagtaagagtcatatgtaagtctgagttataaacctgtcatagtatgattaactgcttttgttctgtttctgtatccttgctttcacatcactacactttgtgccactgtaggcttgtttcaagttagcccaccctctttagaagtgtatgtaaaagttaaatgctgtctttgtccttggcccagtctctggatgttaatccactgggtctgagtgcactcaataaaatcctccttttctacctatcggtctttccagtctcctaattcccacaacacagtgatctaagtgtctgcggagtgttgtagtctcctattattgtgtcagaatctacatctctttataggtcttctaagaacttgctgtattcatgtgcacccatgaatttttttttttttttgagacagtttcactttgttgcccgggctggagtgcagtggcatgaactcagctcactgcaacctcctgggttcaagcaattctcgtgcctcagcctactgagtaactgggattacaggcacctgccaccatgtttggctggtttttgtttgtattttagtagagatgaagtttcaccatcttggccaggctggtctcaaactcctgagctcaggcagtccacctgcctcagcctcccaaagtgctaggattacaggcatgagccactgtgcccagccaacacccatggatttttttagaacacctttttctcttctgctttttccttcataaacattctttcaagtgtacacagggtgcccaaggctacaccttagatacctgaatccagtgtctcctaaaattcagatgtccaagggttcagggacatgtccagagacttggttgttgtaggagaaaatataaattagaaataagaggctttattctcctacctgaaaataatggaagatattttgttcttttttcttaaagcatttagattatatgtagatatttttctctgatttttggaaatatatgtaaatcatagtaacagctaaataaaccatttgtcatttttttttgactcaaggttgtctttctctaggacctcataaccattgctttgtttttgctttgggaaaggttttattttattttttcatttttagtcttgtaaagtagacacagagttgtttagattaaagctcattttaagagtacacaaaagttgagcacaaagataataaagactagaaaatactaagttcctttgagagaaaactgattatccagggtaattatctgatatttgcagtccaaagtacttacacagaaaaagcaagagcagttcagtgtataaactgaaaagtggaatctgtagttgtactttggtttctatttattacttcagaacaattaacatagttattatgtgtagtgtttgtcaacaacctgcactcatattaatagcattttctataatagtatgaatataaggccacaatatttactttgaataccttaaataggcacttcaatattgttctttttacttttgaaatatagtgttttaactgaattatggttacagacaatttttaaaagttctacagacatcatgactagtacacaaaaattatttatacatagatatttgtatctaacatcaaaggaaaactcactacaaaattgttacagtagatattagtctgaaatgctcattagtttccccaaaaggactaattatatgtgagcatggtttcagtgtcttatttcactaaatttgaatgctgctattacaggacaaatcaacatgatgagtgatgtggccacccaaaaccataatagctctttagttaactatgtttcaatctcagatacattccactatataaacaaagtcaggttccagttcttatcaaaaagctctagtggaagttgtcacatgtatttcacaatagatcccccatttgatggctaggagataaaagagcaacagacatgaaagaaaaaccttatgaaattctactgagaatatgccctttttcttcataatgctcatgtttctcatgctgacaatagctgtgcattttgggtgttttcagagaaattccttttaggggaatattttctggcctacttgatcaatcttgtatctaatctgagttttcttcttaagatgcttttaacttagtttgttctcagtagaatcttgctgagatggagagctgcttttctctctcatgctttggttgtctgtttcagaaggcctattcatatcctgtggtttgtgtgaattaggtgggctgtcacagtgagaactcttggagcatctgcacttatcctggaaatccagcagtattttttaatgtcacaattataactagaaactgaggctgaaacactgctcccattcccattattatgaaggcacaattctatccaggaggcctacaggatctcctcatgcagctcaggctttactctctgatgtggcactggagtgctgctatggcaattggggttcatgtatgatgtgagctgccagctgtgagccctgtgctgtgagctgtgtttcagtggcagatggtaggagtcgagaggacactcgtcatcaggagagggtaagcaggagtgctctagcccagtgcttagggagtagaggagccattgctttaaaatgtaaatagccaaaaagatagcaccccatccagccatttctgcaggagagtgagagcctaccttcagcagccacctgctttcaagttggaatattacctcctgtcgtgaagataggaaaagtttattttgtcattgactataacccactggcatgcacagatggcctctcaaattaccaggtaaatttaggataaactctgtatgacatggtgctgtaagttcttccacttgtggactaattataatgactatttttctgtctttgcagtctcttaagcaaattgactgtggtgcatgtcacattctggtttacttgcatataaaaactcttttgttctatcattatggagtttctctgcagctggatacaatttttcttttaattatattttccaaacactatctagaattaccatacatgatataaacatattaggtgccagccaggctttactctagagggtacttttcctctcaggcttccagtcaactcacagttgtgctgcaaagtgcatgctgtcactgggcatctctaatcccagcactttgggaggccaagatgggcagatcaccttgaggtcaggagtttgagaccagcttggccaacatggtgaaaccctgtctctaaaaaaatacaaaaattagccgggcatgatggcaggtgcctgcaatcccagctacttggaggccgagacaggagaattgcttgaacccaggaggcagaggttgcattgagccaagatcatgccattgcactctagcctgggcaacagagcgagactctgtctcaaaaaaaaaaaaaagtgtatactgtcccgtaaatatgcaggcagaatcatgtctctttgttatctatagtcctctacagtcacttctagagggattagatttgtacaaatgttacagggtggaaatcaaccattttacctctttcaatgactcttgtgtcttcaaacctgaaactgattaagagaccatggagccaagaaaccaaatcagagtaacacgtgtgcattgagtagacatgtggacatgagaatctccactttccccttcctcctcttggtaaactgctcacaaatgttcaggtaacatctgctactgctactccacctattcaggacctaaatctgcagatggaaattctgaatctaggtcatgagatttggaaaacagaaaatcttttatctgaggaatgcaaatcctctttttaggtcggggcgaaagttattgcggttttaccatttaatgtaatggcaaaaaccacaattacatttgcaccaacctaatagttgtcaaactcggagagacattaaaatgagaacacaattatgtctttctctcctctttgaaccatatagttatctcttgaaattgtttactattgccaccagtggctataaattaaactgatagtgccacactggacactatagcccatactctaaaccctaacgatgtacactcaatcagtaatcaatgttaattctgtaaataaataagaatttctcacagacaaccttttatcaggccacactctgtccctctctctttgcctttgcaaatccacttgtaagtgctgctaattgaagtgtagattccagtcaacttgaatctttgcccgcagtttacaatcctcaagcttggcccaaataaactgcctacttctgttcatgttgcctcatcttctaccttctagatagatgtataatctagagtgtgccagagcagcctctatgaggagatctctcctttgattgttgtgtgcttgctctaatacccaaggatgcagagccaggttgatcccatctaggatctgcacataaggccaggcctcttcttgggatttacaagacaaggccacactttggattcagaatgtaaaaaaaactaacaggaggcatcttctgcattgtgagatgtcaacatgggcattttaaagacatcttttgagagtgtggctctttgagcttttcagatcttgtccaatgacctgcttcagttgtgtgagaggcttctggtataaatagaatctaatgtcagattcagtaagtgtaaacaagcatcgtaggagtgagatcaaggccacaaagtatccagagccataacacaactatacctacctgtaaaatgtgatgctgggccaggcgtggtggctcacgcctataatcccaggactttgggagtccaaggcagacggatcacgacgtcaggagttggagaccagcctgaccaacatggtgaaaccccatctctactaaaaatacaaaaattagccgagtgtggtggcacatgcctgtaatcccagctgttcaggaggctaaggcaggaaaatcgcttgaacctaggaggcggaggttacagtgagctgagatcatgccactgcactccagcctgggtgacagagcgagactccatctcaaaaaaaaaaaaaagtgaacactgtagtagagtattcttgtccttcctcttacccaagagctagcaaatcaggacgggtgatccaggttctggagctctgccagggcagttccattttctatttagaatgagcctgagtctcttctgcctttcttattattgggccatcagcacagggtcactgggaaccctctctcaattagctaggtatatttcagacatttgatgatgtccagagcagaactgtgtcaggatgataagagtggttaattccgcttctgtttcaatgtaagagaaatgaatcatcttgtgtttgtttctttcctcatacaagagatgtgtttggttggtacccagatgagagtttctctagttttctggtactttgggtaaaagacgaggaggaggtctggagactcaaagcagataaactaattgcttcattaatatgaccattagaaaaaaaatgaagcagtcatggtccctaccatccaaaaactcttggtttagactatcaactggataaatggttgaatgaagcatcatatggttggtacaatgaatacgtgtgtgcaaaaaaacttgggctttatttgggccactttctttacattgttgtaacttctgatgtcatcagctgaagggatatttatggacagaagaatttttattattatttctatttttcttaccttgttaagaatatatatttatcttctaataaaattaccctagaaaaccttaagagatttgcttaaattgcttattagtatatgttataaaattgacagcacagtagctaaaaaaaattaaaattacacaaactctggaatttaagtttttcttaggtaagtctaggaaaaacagaactggaagtacccccactggcatagagaacagaattctacacagggtccactctttggcccagttctgttcagattcaccctttttggatgccttattttggtctggccccactctggagccttgcctcacagaactgattagaagagatcagagttttgggtggtatattttgctacctttctagagctggtgctctgatttcgtgaaactcaaaagcagataagtggaaaaatacgtatttttaattttttattaaaatcagtgcttaccaagacattccatttagcaacttgttttctattcctgcagatccagtagttgctccacaagtcacaataaattaaatataaacacaataaaaattcctctaaactacattaaactcttaatttctgtattcctctcatctgtctatatttagcttttattctatacattttattttttaaaaatcaatgacagagaaacagaaaaattaaaattctgggtcctttatctaaatcctgggaattattaaacacttagtaccaactcccagggtgttatgaggatgaaatcacacagtatgttatgcccagcacagtgctctgtaacatactcttgagcacatagtacctgcttaacaaacattgcattagtacctgtgcatatgctatttttcaaatgcagactcattcagacattgctgccttctgtttgttctgtaaactttattttactatttttttcaggtttttgagaagctactttaatctgttatgaaaagagaggtttcttcactttgacttttttttttccataagtcactggtgtacaggtagtatttggttacatgcataagttctttagtggtgatttgtgagattttcgtgcacccatcacccaagcagtttacactacacccatttgtagtcttctatcccttgccctgctcccactcttcccccaaagtccccaaagtccattgtaccattcctatgcctttgtgttttcgtagtttagctcccacatatcagtgagaacagaaaaccttttatctgaggaatgcaaatcctcttgttaggtcggggcaaaagttattgtggttttaccttttaatgtaatggcaaaaaccagaattacatttgcaccaacctaatagttgtcaaactcagagagacattaaaatgagaacacaattacgtctttcctctttgaactatgtagttatctcttgaaactgtttactattgccaccagtggctataaattaaattaatagtgctgcactgtgcactataacccatactctaaaccttaacgatgtatatatacccaattaataatcaattttttttgtaaataaataatttctgacagacaaccttgtatcagcccacttgggggtgtctctcaggtcctgcaggagcagtctgcttccttcagatggtctgtgggtcctcttgggattgctagtttgttcttgcagtcaatctggagctaaaattcacactgtgaacctccacacacttctctgtccaagtcggagctgcaatctagtcctgcctcccatccaccatgactgagcccattccactttggctctttaagtaagtaggccacctgttctgtaaactttaaagagtcagcaaagaatatgatactttagtgtacagatgagttgtcttcatttgtatcagaactttttgtgttgtgacaagagtcctgagtggaagggactctgtgctgtgcctgctttgtctaactaatactaatggtgagcccagggggagttacatcagcaccgatgggacttgtttaaaacactcattttggacccttttcagacctgcagaatcacattatgtagaatggggtcaaaattaccaagtgatttataagctcattacagctcgaggggcaatgctttgccaagtggttatcagccggggtttctaattagaattccacagccaatttacaaaaatctctttacttgtgccctttcaacaggttctgcatagaagcatccatgttgttttaattaagtgcctcatgtgattctaaggtgaggccagaatcaagtatgaaagcttcaagacacattcatgagagttccacctttgcactaaagggtggttacagggcctgttctgtttgggtttggtagggacagggcagtgcagtccatactaccaatattgtagcagaaactgctgttgtctgtggcaggggagggcacctgaggacaggaaagaagaaatgtgtctccatggaacagtgcattgttcctaaatgtctgttattaagaacagaaatgggtggactttttttgcaagtcttgattcttctgcctgtgggtgtggtggcagcaggtaaacaggttctgttgacattttaaaaggcatagtctcaagatgcaggtgtgatttgtttggagcatgtcatctgagcaggaattttacagaaattggaaaaagaagaataaatggcgatttttcagctaatcatgtcccagatcaagagctgtgtccactctgcctcctggactgtcatgcatttagtacttgcaagcctttacttctctacttgtatttttcctccctaatgagtttaactactttttaaaattcttatgatagtcaagggtctctgaaaaatatttccttcctacataccagatctttctctacattctctacatcatagctttttatgtgccatgcagaattctcaccgattataaattaatctgcaatattaaaaatgttctcttgtggctgtgaaacaggaggtgtggatactcaaggtttctattagggaaaggtgggggtcctcagtaaagatggagaacatgtaatgttgaggttccatctgtgttctccattggctttatgcagaacaggattttcaaaatgcttatttaaacaggatggcatttatcacccagaaagttctaaaaaataatatatattaggaggtacctgttctctagagtgctaaaaaaagactactttaaatcattactaaaaattatagaacacttgactgggtgcagtggctcacacctgtaatcttaacactttgggaggccgtggtgggtggataacttgaggtcaggagttcaaaacctgtctgaccaacatggtgaaaccccatctctactaaaaatacaaaaattagccgggcgtggtggcaggtgcctgtaatcctagctactgtggaggctgaggcaggagaatcgcttgaacccaggaggtggaggttgcagtgagccgaaattgtgccattccactccagcctgggggacagagtgagactccgtctcaaaaaaaagaaaaaaaaaattacagaacccatgagtcatcagtaccttaaactttgaataaaactgatgtttctttatggttaaattcagactgtaatctacttttaggtagcaagatcacatcagtgaggctatgtctttctgtatgcaccagcacatcataaaaatttgtcctagtgcagttgatgttaatgattcacttggttaaagaactctctgacagactgttttactatagagttgattattttttctttattattaactatctttatgcagctgatgccatcacatttaatctggcagctgcccttcttccttaggttttctttgcatatatctgtctttggaaaatgaaagctctcatctttgtttacaggacaaaaaaactgggaaaaacacagcttccttcatttactgaatgtttgacaaaatattctttttggatcaaaaacattggcattactggtgagcttgttagaaattcagcaactcagactttattccagattttctgaaaaaataatctgcattaacaaaatcttcagttcattgaacacattaaaatgtgagaggtaaattctaactcaacatgtctttttgatctgaaaaatatacacaactcattctgtaagatgtaaacatagcactcaaaaatgtatgtttctgttcatgcccttaattttatactttatcacttagaaaaatgtcatgtgtacactgatgttgtggatcttatgccactattttctcaaagttagagaatatattagagaacatttctgtttataaattagtttattgaataatttcagtcacttgtataagtcagaagcagttctctttactctctcatttcaccttgaattaaataaaaaattctacccatgggcacttggtcaatatatttctctctctttctctctccttctgttggtgtgtgtgtgtttcagggaccattgacatttacagatgtggccatagaattctctctggaggagtggcagtgcctggacacagcacaacagaacttatatagaaatgtgatgttagagaactacagaaacttggtcttcctgggtgagaataacttcaatacaacattcctaatataccctaaatgtttcatttctcctctttgtagaatgttctttggtaatttatgctttgcataaatgagtttcagattcctgcttttaagaaaagtttggggccgggtgtcttggctcacgcctgtaatcccagcactttgggaggccaaggcgggtggatcacgaggtcaggagaccatcctggctaacacggtgaaaccccgtctctactaaaaatacaaaaaattagctgggcacagtggcaggcacctgtagtcccagctactcgggaggctgaggcaggagaatggcgtgaacccgggaggtggagcttgcagtgagcggagatagcaccactgcagtccagcctgggcaaaagagcgagactccatctcaaaaaaaaaaaaaaaaaagtttggggatttgttcatgtagaaaagaatttcttcaagatgttttgtcttcacctgaactttccatattcctgagctgatttgtattatgtactcttgattagtgataatttcaggaatttggtggcctaaaatattgttgcccacaccttaaaatctaattgtcacaatcgattttttattaagtagtactgggcaatgaaattaagaacctaaaaattttaaatattttctaaagatttagaaatttctcttataaattggtatttgggcattaatttactagaatattatattacatcctctttactgagcacattactaaattggtaattacagaatataagcaagattcatcttctttatttttaataaaacaggtattgctgtttctaagccagacctaatcacttgtctagagaaagaaaaagaaccctgcaagatgaagcgacatgaaatggtggatgaacccccaggtaggtgagagtgaacacaacagacaacacagatgagaggtcccaaggccaataagaaagccagtccttaacaatgtgatttgggaagctatgtttcaaagaaaatattttctgaaaaactgtgttctaaaaaactttcagcctggcacagtggttcacacgtgtaatcccagcactttgggaggctgaggtgggcggatcacctggggtcaggcatttgagaccagcctggccaacatcatgaaactgcatctctactaacagtacaaaagttcactgggcatggtgtcacatgcctgcaatcccagcttctcaggaggctgaggcaggagaatcgcttgaatctgggaggcggaggttgcagtgagctgagatcacatcattgcactccagcctgggcaacaagagtgaaactccatctcaaaaaaaaaaaaaaaaaaaaaaaccaaaaaaaaaaaaacacccgtcttggtgactgccctacagagcaaagtcctgaagaatattcattctgttgaaaaataaaatggggattaacaactaccaaaaccccttgtaacaagccaactaaaggtggaccctagtacagaccccgcagccttgtgaccaagctacaacccctctctattacaaatccatagggcatctcagcaccctggggacccaacaaaagaggcttacctcctgaggccagtttataaaaaattgaagaggtgtctgcttcttcacattcacagacaccaatgcaaaactgtattgtacccattgttaatgcctctattttaatatagtactggaagtatgtggcataaatattagtcaaaaaaatagaaaataggctgagcacggtggctcatgtctataatcccagcacttcaggaggccaaggcagctggatcacctgaggtcaggagttccagaccagcctggccaacttggcaaaaccctgtctctactaaaaaatacaaaaattagctgagcgtggtggcaggcacctgtaatcctagctacttgggagactaaggcagggagaattgcttgaacctaggaggcggaggttgcagtgagccaagctcatgccactgcactccagcctgggtgatggagtgagactctgtctcaaaaaaagaaaaaaaaaaaaagcattgaaattgaagacaagtaaaaagttgctgtttgtagattatgtaatctgacattaaaaaaccataaacagtacattaaaacctgtctaaactagtaaatgcccttagtatattagcaacatacaaaattaacatacaagtataagttatggttccatacacttaaactatctgatagaagagaggaagaaaacaatcttatttacaatagcattagagtaataaatttctgaaaacaaatttaaccaaggaggtaaaaagtatttacaattaaaaatatatcaatgaaagaaatttaaaaagacgtaaattttaaaatattttgtatctatggattgaaacaataaatatttttgaagtgccatattattcaaagtgatctatagattcagtgaattcccaatgaaaatttcagtgttttttttttcacagaaatgcaattttaaaatttacatgaaactacaataaactttgactagccaaagcaatcttgaggaaaaagaaagcaaaagaacatcatacttcataatgtcaaactatatttcaacactatagtaatacaaacatagtggaatgtgcagaaaaattaacaaaaaaacactactggaacagaaaccactactctcaaacattttagacataatacaaaaagagaatctaaaaagtagtttaacaaagagtttttcaaaattaggcagatacttgtttgtcccccaaaacaatgaaaaagcagtcagattatgcagtatattatatgccatgaagagggttttggctcactgtaagcttgaacaaagatcactgaggggaaagtagaatccttaaaaaatataaaagcataagacagaagatgcctctatgtgagaggattttttttttttttttggagacggtggtctcgctttgtcacccaggctggagtgcagtggtgcagtcttggttcactgcaacctcggcctcccgggttcaagcgattctccaacctcagcctcccaagtagctgggactacaggtgtgtgccaccacacctggctaattttgtatttttagtagagacagggtttcaccctgttggccaggctggtcttgaactcctgacaggtgatctgcctgcctcggcctctcaaagtgctaggattacaggcatgatccaccttgcccggtccaaatttttttttttttcatttctaagtatttgagaaacataacattttaaagtaatggctgcattcttgttttccacaatgaacatgggtttcattttcattgcatcatcaacagctttggtgtttttaaaaaaatttacagtttccattcttaatggatgtgaggtgattttggttttcattgttattttcatgcatatctctacaaattagtgatcttgtgttcttaaatgctttttttccagttgtgcgtcttttttgatgaaaatttagttcagttgttttcccattttaaaatcacattattcaactttattgtttagtttcaagaggtgtttatatattctgaatattaaatcatatccatgtgatttgcatacattttcatccatttcctaagagacattttcactgtattgaacgttttctctgatgtgcagaaattttttagtgcagttaaatttttctattttctttcttgctcatacatttaatgttgtatctaagaaaatgcggccaagtccaatgtcatgtctttcttctatatttttttctaagggatttgttagtggttctttttttttttaatgtccaagtattttatttaaaatgttttttgtatatggttcaaggaaaggacccaactttattttaccagtgtttcttttgttttttttcaatacagagtcttgctctgttgcccaggctggagtgtaccggtgtagtctcagctcactgcaacctgtttcccgggttcaagcaattcttctgcctcaacctcccaagtagctgggattacaggtgtatgccaccacacctggctaatttttttgtatttttagtagagatggggtttccccatgttggctaggctgtattgatatccagtttccaatattattttttaaagagattttcttttctctgttgtgtgctcatggcacacaacagatcatatacagaagggtatatttctgtgctgtgtattctattctttcatctttcatctgtcttgtcagtaccacattgtttttgttactgtagcttttaatatgttttgaaatcaaaaagtataatgcctctttattctttttcatgggtgtttggctatagtttatgatcaaattttacaattttaaacaatatttctgtaaaaaactgtgctattgggattgtttagggattatattaaatgtgtttatcactgtctgttgtattgacatatttgaaaaattaaatttttgacccctaagcaagaaaatgttgaagagcatgttttattttcatatatttttggattttccagttttacttttgcttttagttcctagttttatttagttttggccacaaaacatagtgtgtaattttggtcttttaaattttatttgttgttttgagacaggagcttactctgtcacccaggttggagtacagtggcatgattttggctcaacgcagcctcaacctcctgagctcaagtgatccttccatctcagtctcctgactacagacatgcactaccatgtctggctagtgcagtttttaattatttgtagggacaggatttcactatgttgcccaggcctggtctcaaacttgtggctccaagtgatccttccaccttggtgtctaatgtgttgggattaaaggcatgacccactgtacccagccaatattcctaaatttagtaagacttgatttgtgtcctaacagaatacaccaggtgcaaataaggatattttgcttttgactggagagaatctcttgctttcagctggaaagttgttttttgtgtttttttttttttgttcgtttgtttgtttttttttgagacggagtatcgctctgtcgcccaggctggagtgcagtggcgtgatctcggctcactgcaggctccgcctcccgggttcacgccattctcctgcctcagcctcccgagtagctgggactacaggcatccaccaccacgcctggctaattttttgtgttttttcttttttttttttttttagtagagatggggtttcaccgttttagccgggatggtctcgatctcctgaccttgtgatccgcccgcctcggcctcccaaagtgctgggattacaggcgtgagccaccgcgcccggccttgtttttattttttaaagaagtgtattcatgtatcatcctaatagtcagtaatcacttgctacacctgttccctgtctgtggtactgcagtcactccactcctgtaacatttacctttggtctcagcagactcaaactctcattgtgaagtataccaccatttctttccttctttctttctttctttctttctttctttctcttttcttttctttcctttcctttcttttcttctttctttctttctttcttttttactttctttctttctttctttctttttcttttctttctttctttctttctttctttctttctttctttctttctttctttctttctttctttctttctttctttctttctttcttctttctttctttctttccttctttttctttttttgagacagagtcttgctctgttgcccaggctggagtgcagtggtacggtctcagctcactgcaacctccactttctgggttcaagtgattctcctgcctcagccttctgagtagctgggattataggtgcctgccatcacgcccagctaattttttgtatttttagtagagacagggtttcaccatgttggccaggctggtttcgaactcctgactttatgatctgcccgccttggcctccaaagtgctgggattacaggcatgagccaccgcgcctgaccaaagtataccaccatttctttcagcagtttatgttgtgggaagctaaatccagcatctggtaatatcctagaagccagaaataaagatgtatgtgccaatatatttcttgtcttttaaaaacaaaatgaggagctggcaatttacttccaaaggcactgtgttttattggggaacaggaagagctgtgttgggtaactgtaacagaaatgtttttcattctatgtgactctttgcattgtactcacctggggcgttgtacacatataacttattgataaattatccactaatatattttggttagtatgtctttgttatatttatatgtttatgaagaaattagaatctggtattttgctatgctgtgttgcttacgtagtttttataactttagaggttttgtttgtgacgtatatatatctgagtctagtaagtgaagtaatttgttgttttaattttattttagttgtgtgttctcattttgctgaagacttttggccagagcaagacataaaagattctttccaaaaagtgacactgaggagatatgataaacgtggacatgagaacttacaattaagaaaaggctataaaactgtaggtgattgtaagctatacaaaggaggttataatggacttaaccaatgtttgacacttacccagagcaaaatgtatcactgtgatatatatgtaaaagtcttttatgcattttcaaatgcagatagatacaagacaagacatactggaaagaaacctttccagtgtaaaaaatgtggcaaatcattttgcatgctttcacaactaactcaacataagaaaattcatattagagagaatacctacagatgtaaagaatttggcaatgcctttaatcagtcctcagcccttactaaccataagagaatttatgttggtgagaaacactacagatgtgaagaatgtggcaaagcatttaaccactactcaacccttactaaccataagagaattcatactggagagaaaccctacaaatgtaaagaatgtggcaaagcctttagcaggtactcaacccttactacccataagagaattcattctggagagaagccctacaaatgtgatgaatgtggcaaaacctttagcatatcctcaacctttactaaacataagataattcatactgaagagaaaccctacaaatgtaaagaatgtggcaaagcctttaaccggtcctcaacccttactagccataagagaatacatactggtgagaaaccctacaaatgtgaagaatgtggcaaagcctttaactggtcttcaactcttactaaacataaggtaattcatactggagagaagccctacaaatgtgaagaatgtggcaaagcttttaaccagtcttcaagacttactcgacataaaaaaattcatactggagaggaaccctacaaatttgaaaaatgtggcagagtttttacctgttcctcaacacttactcaagacaagaaaattcatactggagagaaaccctacaattgtgaagaatgtggcaaagtttttacctattcctctacacttactagacataagagaattcatactgaagagaaaccctataaatgtaacgaatgtggcaaagcttttaaccggtcctcacaccttactagccataggagaattcatactggagagaaaccctacaaatgtgaagaatgtggcaaagcctttaagcagtcctcaaaccttaacagtcataaaaaaattcatagtggagagaaaccctacaaatgtgaagaatgtggcaaagcttttatcctgtcctcaagacttactcaacataagaaaattcatactggagagaaaccttacaaatgtgaagaatgtggcaaagcttttaaccggtcctcaagacttactcaacataagaaaattcatactggagagaaaccctacaaatgtaaacaatgtgacaaagcttttacccactcctcaaaccttagtagtcataagaaaattcatagtggagagaaaccctacaaatgtgaagaatgtggcaaagcttttaatcggtcctcaagacttactcaacataagaaaattcatactagagagaaaccttacaaatgtgaagaatgtgccaaagcttttacccggtcttcaagacttactcaacataagaaaattcataggatgggtgtggtggctcatgcctgtaatcccagcactttgggaggcagaggtgggcggatcacgaggtcaggagatcgagaccgtcctggctaacatggtgaaaccccgtctctactaaaaatacaaaaaaaaaaaaaaaaaaaattagccaggcgtggtggtgggcacttgtagtcccacctactcgggaggctgaggcaggagaatggcctgaacccggaggtggagcttgcattgagccaagatcacaccactgcactccagcctgggtgacagagccagactccatctcaaaaaaaaaaaaaaaaaaaaaagaaaagaaaattcataggccaggtatggtggctcatgcctgcctgtaatcccagcactttgggaggccgaggcgggtggatcacgaggtcaggagttcaagaccagcctggtcaacatggtaaaaccccatctctactaaaaatacaaaaattagctggatgtggtggcacatgcctgtagtcctagctacttgggaggctgaggcaggagaattgcttgaacctgggagccagaggtagcagtgagctgagatcacgccactacactccagcctggatgacaaaacaagactctgtctaaaaaatatataaataaataaaagaaagaaaattcatagtagagagaaaccttacaaatgtgtagaatgtggcaaaactcgttttaactaatgctcacatcttattgcatagaaaagcatttatacctgaaaaaaggtatacaaatttaaaaaatgtggaaaagccattaaaatctgttcacatcttaacaacagagagttgatacttaataagagcattgtaagtgcaattactgtcaaacaatcttgtagaaaatatcatcctttaaagtgaatgagactagtctgaggaaaaacattacaaatgtaaagagggttatagtgcatttacttgtatcacagatcttgttgtacacattttatactagaggaaaaccctgaagcagttgcaccaactttgttcaacatcagaaatttatattggagaaaaatccagcaagtgtaataaatttggaaaaacttttttttccccaaaaactatacctcaggaaacaatggagagtttatattaacatatatttttgcatatggccatatgtataaaaatatttaattcaaaattgaatttaaaaagtctacataaatatcatacatagatatgtatgatattgaatacatgtattaaatacatagaatatgatatttaatacatagaaaagtctacatgaatatcagaatttacagtagaaacaactaagacacaaacacttgagacattacactaaagtgctgagtatagaaaataaaactaaagttgttaaattatttgtatataacttttaaaagagtggaagatattttgcaaagttatattcaaagtgtactttttatttatttttttgagatggagtctcactttgttgcctacgttggagttcagtggcacaatttcagcttgctgccaacttcgacctttgggttcaagcagttctcctgccacagcctcctgagtagctgggaatacaggcatacaccagcatgtctggctatttttttttttttttgtatttttagtagagatgagatttcaccattttgtccagggtggtctcaaactcttcatctcaagtgatctgcccaccttggcctcccagagtgctgggattgcagccatgagccactgcacccagcccaaagtatgcttttaaaaatatgtatatatataaaatttttgaaaagcaaattatgatataattcaagtatcaaattacttcatgctgtttcattgttcctattcacatgtgaaagcatgtgatcaattattgctgcatcacatatagactcattaggtggaaattatggcctcttctgtaaaaaagtaaggacattaaaatgtaagatgcttgatgaaaatctaagtggagaggctctttgtggttaacttattgagtgatgtatgaggtcgatgttcagagtaatatgcctctgtattacagtgatagaaaatattttttagttaaaagtgaatttataataaaattgtaaatcattttagtgattgagcttttatgttataaaatgcagtatatttcaaaatttttaaattatatgtaaatttgattttatttgttaccatgttaagactattgtgcatttaatgaagcattattatgctatcaactttaacctatcccacgttactcaagggtgtagctaaatgaaggtagcagtatgctatttagtaacatagtggaatagcatctctagtaatctcttttgccagtagctttaactggcagataagttaatattgttcccataggttaaatatttatcctttttttgatatttaaatttttttcttatttttttgtgggtacataatatgtgtatatatttatgcaaatctggcatattttgatagaggcatacaatatgtaataattacatcaattacatcagggtaaattatgtagccattacttgtaacatttatcttttacaaacaactcaattatgcacttttagttattttaaagtgtacaattaaattgctattgactgcatggttatctttgtggtataaaaatttatatataagtataaataaactcatttctgagtcttaaatagatattttcaattatttgtaatatatttttatttgaacatttggcctctctgcctgcaaacacacacagacttttagctttgatttacatagagttaaatgtacacatgtgtggctgtaaagataaatcttagatgtaagaaaattatacagttattaagtgtctttgtgtgaatacacctaatttttttgaagagtaatattggaacaaaaagaatcattttattaaggttgctaatatactagaaaacaaaaaacctcaaaaatgctgaaagcaaatctatactctctttttattgaatttattactgtaaaattttatggctatagttcagaatctccccatgcaaattctctgtatttatttgcctggtactcatgctaggcccttaatttttttgtgtgttttatatattttttgttgtatagtttatgaagtattcattatgtgagctggtcagagattataataaattttataaaattgagtaatgcacacaagataatttttagatataattttaaaatagtgtatttacattttatttagttagggcattccattttattaactggagaaccctatataagcattttttaaaaattattgcttcttttcacttttataagtgacaagtaaatttattaattgagtcaatttgttcaggtaagtactagggagacttcataagtcatgaggatgtttttatatataaatgtagcaaacaaatatgaaagttcctcctgtgtcacagacgctccataataagccataaatattcctgctggagttagtttgtattttcaagtcagagatgaaaaatatccatggtgaagaaatcttcatgtggcgaaggcatttttgtccaggctgcaaagctgactcttaatgaatttaaagagaaattttgcttctcttgtttcttatcctgttttgtttgtcttatgtgtattccaaggttgtatgcattacaatgaactacagtacttcttttactgtgttatggcaacagttttctcactgttgtcttcatttcacatggtactttgaaggttctaatgagaaagttttgttttgttttgttttgtttgagatggagtttcgctcttgttgcccaggctggagtgcagtggcacgatctctgctcactacaacttccccctaccgggttcaagcgattctcctgcctcagcttcctcagtagttgggattacaggtatgcaccaccacgcctggctaattttgtatttttagtagagacggggtttctccatgttggtctggctagtctcaaactcccgacctcatgtgattcgcgcaaagtgacttggcctcccaaagtgttgggattgcaggagtgagccaccacacctggctgaaagtttattttttaatgcactgaaaaagtggttttaactggggaatttgcttatcaatataacttttggattgataaaataagaggcacacgtttttcctgggtgagagaattacatcacttagcattgtttgtctgtaaaagaaaaatctttatgtattttatttttttgagatggagtcttgctcttgtcacccaggctggagtgcagtgatgcagtcttgactcactgcaacctctgcctcctatgttgccgcaatctcctgaatagctgggattacaagcacccgcaaccacgcctggttaatttctgtattttagtagagatggggtttcagcctgttggccaggctggtctagaactcctgacctcagatgatctgcccgcctcagcctcccaaagtgctgggattgcaggattgagtcactgtgcctggctggaaaaatctattagattcttacacaaagtgtggtaaatatcaattttgttagaaactcattttgtattccatttttttgtttgtttgtttctttgtttttgtttttttgagatgaagtcttgctctgttgcccaggctggagtgcactggcaatatcttggctcactgcaaccttcacctcctgggttcaagtgcttctcctgtttcagcctcccaagtagctgggattatgggcctgcgccatcacatccacctaatttttgtatttttagtagagatggggtttcaccatgttggccaggccgatcttgaactcctgaccccaagtgatccacccaccttgtcttctgaaagtgctaggattacatgcgtgagctaccatacctggccaggaaccatctttgaagttatatttttttttttccccttttgagatggagtctcgctgtattgccgaggctggagttcagtggcatgatcttggctcactgcatcctccacctccccagttcaacaattctcctgcctcagcctcctgagtagctgggattacaggtgctcaccaccacacccagctaatttttgtattttttgtagagatgggtttcactatgttggtcaggctggtctcgagctcctgaccttgacgtgcactctttgtggacaccaggacacaaactctctgtggagtcagcaagcaaaacgacagcggaacacaacagcagaagacccagagacagaacatgcatacagggtgtgaggaggggagctcaggtcaaacttcacattgtccagagagacagcaaattagaggaggaggaaggtgatcagcaggagagacatctgcagggaaaaaaatgtaacccagagataatttaaagttttttaaacaaatgaaaaatattttagggcaagtgtaagttaagaggaggtatttcagcaagacttagcattagacataaaatcaaactaatatggactgcaataattgttaaagaaatttgtattaactagttgataaaatcaatgtatactgcttggatctgcagtgaacgatagttaaccactttgcagcgtttactgactacagttttaggtaaaaattacgctattagtattccaaattactagagggatggggaagggaagttgacagaaaagtggttctcaagtgtatgttagtattgaagggtaatttgtagagcttatatggtttaggttcaaatggagaaagaatgatttaaaaactgagagggggagaagaactaggctgtataaaaaactgcggccaggcacggtggctcaggcctcccagcactttgggaggccgaggtgggtggatcacctgaagtcaggagtccaagaccagcctggtcagcatggtgaaaccccgtctctactaaaaatacaaaaattagctgggtgtggtggcgcatgcctgtaatcccagctacttgggaggctgaggcaggtgaattgtttgaacctgggaggaggaggttgcagtgagctgagatcactccattgccctccaaactgggcgacgagcaaaacttctctgaatgaatgaatgaatgagcaaattgagatcccctgaagcagcagatgctgtgaaactggatgttctagtaccaaacataacaaaggactaataaagaggggaacaaatttaaaatagtttatgtgtcgactagtttatgtatctaaaaagtaaaaattaggccaggcgcaatgcctcatgtctataatcccagcactttgggaggccgaggtgggagtatcacctgagattgggatttcaagagcagcctgacagagaaaccccgtctttactaaaaatacaaaaattagctgggtgtagtggctcatgcctgtaatgccagtcactcgggaggctgaggcaggagaatcgcttgaacccgggaggcagaggttgtggtgagtggagatcatgccattgcactccagcctgagcaacaagagtgaaactccatctcaaaaaaaaagataaaaattaggagtcgatttcaccatatagtttaaaacaaattcatagtttttttttgtttgtttgtttttttgagactctcactgtcacccagactggagtgcagtggtgcaaccttggctcaatgcagccttcatctcctgggttcaagtgattctcctacctcagctttctgagtagctgggattacaggcatgcgctaccacacccagcttatttgtgtatatttagtagagatggagtttcaccatgttggccagacatgtctcaaactcctgacctcaagtgacctgcccgccttggcctcccaaagtgctgggattacaggcatgagccactgtgcccagcaagaattttgtaatgcatttatcctgaatatacctgcttagcaaaataccataattttctacatacatttctaaatacatttaggcttattttctacaaatattattctggacatcttataaatgctaggaacactctggaagaatgaatgtattgagttttacagtatttcaggtatctacctagagtattaaatatttcttgttttttgtttttttgttgtttttttgagatggagtctcactctgtcgcccaggctggagtgcagtggcgcaatctcggctcactgcaagctccgcctctcaggttcacgccattctcctgcctcagcctcccgactagctgggactacaagcgcctgccaccgtgcccggctaatttttttgtattttttttttagtagagacggggtttcacggtggtctccatctcctgacctcctgatccgcccacctcggcctcccaaagtgctgggattacaggcgtgagccaacatgcccggcaaatatttcttaatcaaaatccaatctctaaggaatctatttagaaattttagtagattctaataaaaatgttttcctggaatattttgtgaggcgcattatgcagatcctggaaatattaagcgaattaaagcctctaagcctttttttttttttttttttttgagatggagtctagctctgttgcccaggctggagtgcagtggtgcaatcttggctcactgcaacctctgcctccagggttcaagcaattctcctgcctcagcctcccgagtagctgtgactacaggtgtgagctaccatgcctggctattttttggatttttagtagaaatgggtttcaccatgtttgccaggctggttttgaactcctgacctaaagtgatctgcccacctccacctcccaaagtgctgggattacaggcatgagccaccacgctcagcctccaagcctaaatttttttattttcctgaatgcaatttaaggaattttatttcctgaatgcaatttaaggaattttaaattgaccatttgtcaatttaaaagggtactaaggctataagaactcagtcatatggacgcacacacagacacacagaaaatattaatcaggtaagttgtgacatcaagtaggcaaaaacccaaattatttctgaaaagtttcctagttcgttttaatatttcaatattcttctgaatattctactttttgccatttttttttgcttccctctttgctatataaatggaaggcaacacacatcctattgttgagctcttcaaagaagccttggatagagaatatgaagactattccagatttttctttgagtgtagacatctttgacagttttcaaattaaagaagtatacaggacaggtgcggtggttcacatttgttatcttaacactttgggaggctgagtcgggtggatcacctgcggtcaggagtttgagaccagctggaccaacagagtgaaaccacagctctactaaaaatataaaaattagccaggcatggtggcatgcgcctgtagtcccagctacttgagaggctgaggcaggagaactgcttaaacccgggaggtggaggttgcagtgagccaagatagcaccactgcactgcagcctgggagacagagtgagactctgtctcaaaaaaaaaaacaaaacaaaaaaactacaactagaaatactctattatgtaggatacatggtactgtctttataacaattatctttgcttcagtttttttaaattacttttattactaagtttggaaattttgtttacttaagttattgtcagcacaggctaatttcaaactgtaatattggaattaacagagttttgtaaggatttttgtttctgcaaaatgtcctcaatgtatgcacaagtttttatatcctagaaacaatgttaattaggggacttttgtgtaaaattggtcttcaacggggttcaaatcgtggtgtatatacatatataaatatatatatatataaatatatagatgattttattttttatgtttttaaatttaaattttttaatttctgtgatacatgtgcaaaacatgtaggtttgttacatatgtatacatgtgccatggtggtttgctgcacctatcaacacatcatctaggttttaagccccacatgaattaggtatttgtcctaatgctctccctcccattgccccccacaccctgacaggccccagtatgtgatgttccccttcctgtctccatgtgttctcgtcgttcagttcccacttatgagtgagaaaatgtggtgtttgattttctgttcctgtgttagtttgctgagaattatggcttccaatttcatccatgcccctgcaaaggacatgaactcattcttttttatggctgcatagtattctgtggtgtatatgtgccacattttcttatccagtctatcattgatggacatttgggttggttccaagtctttgctactgtaaagagttctgcaataaacatgtgtgcatgtgtgtttatagtataatgatttataatcctttgggtacatacccagtaatgggattgcttggtcgaatggtatttctggttctagattcttaaggattgccacattgtcttccacaatggttgaactaatttacagtcctaccaacagtgtaaaagcatttctccacagcctcacgagcatctgttgtttcctgactttttaataattgccattctaactggcatgagatagtatctcattgtggtttgatttgcatttctctaacgactagtgatgatgaactttttttcatacgttttttggccacataaatgtcttttgagaaatgtctctttatatcctttgcccactttttgatggggttgtttttttcttataaatttttttaagttccttgtatattctggatattagacctttgtcagatgagtatcttgcaaaatttttctcccattctgtaggttgcctgttcaccctggtgatagtttcttttgctgtgcagaagctctttagtttgattagatcccatttgtcaattttggcatttgttgcagttgcttttgtgttttagtaatgaagtctttgcccatacctatatcctgaatggtactacctagattttcttctagtgtttttgtggtttggggttttacatttaagtctttaatttttcttgagtatatttttgtataagttataaggaaggggtacagtttctgttttctgcatatggctagccagctttcccagcaccatttattaaaaagggaatcctttccccattgcttgtttttgtcaagtttgtggcagataagatggttatagatgtgtggtgttatttctgaggtctctgttctgttccattggtctatatatctgttttggtaacagtaccatgctgttttggttactgtatccttgtagtatagtttgaagtcaggtgacgtgatgactccagctttgttctttctgcataaaattgtcttgactatacagattctttttttggttccatatgaaatttaaagtagtttttttctaattctgtgaagaaagtcaatggtagcttgatgggaatagcattgagtcataaattactttgggcagtatggccattttcatgatattgattattcctatccatgagcatggaattttttcccatttgtttgtgtcctctcttatttccatgagcagtgttttgtagttcttcttgaagaggtccttcacatcccttgtaagttgtattcctaggtattttattctctttgtagcaattgtgaataggagttcactcatgatttggccctctgcttgtgtattgctggtgtatagaaatgcttgtgatttttttttttttttttttttttttgagacagagtctcactctgttacccaggctgtagtgcagtggcatgatcttggctcactgcaacctctgcctcctgggttaaagcgattctgttgcctcagcctcccgagtaggtggacctcagatgatccacctgcctcagccttccaaagtgctgggattacaggcatgagccaccatgaccagccaaatgcttgtgatttttacacattgattttgtatcctgagattttcctgaagttacttatcagctcaaggagcttttgggtggagacgatggggttttctaaatatacaatcatgtcatctgcaaacagagacaagtttacttcctctcttcctatttgaataccccttatttatttctcttgcctgattgccctggccaaaacttccaatactatgttgaataagagtggaggagccaggtgcagtggctcactcatgtaatcccagcatttggggaggccaaggcgggtggatcacctgagattgagagtgcaagaccagcctgaccaacatggagaaactctgtctctactaaaaatacaaaattatccaggcatgttgtcatacgcctgtaatcccagctactccggaggctgaggcaggagaatcacttgcacccaggaggcagaggttgtggtgagccgagatcatgccattgcactctagcctgggaaacgagtgaaactccgtctcaaaaaacaaaagagttgtgggagatggcatccttgtcttgtgccagttttcaaagtgaatgcttccaccttttgtccattcagtatgatattggctatggatttgtcataaatagctctattattttgagatatgttccatcaatacctagtttattgagagtttttagcatgaaggggtgttgaattttatcaacagtcttttctgcatctattgagataatcatgtgttttttgtcattggttctgtttatgtggtggattattttattgatttgcatatgttgaaccagccttgcatcccaaggatgaagccgacttggtcgtggtggataagctttttgatgcgctgctggaattggtttgccagtattttattgaggattttcacttcaatattattcagggatattggcctgaaattttctttttctgttgtgtctctgccaggttttggaatcaggatgatgctggcctcataaaatgagttaggaaggagtccctcttcttccattgtttggaatagtttcagaaggaatgataccagctcctctttgtatctctgatagaatttggctgtgaatccatgtggtcctgggctttttttggttggtaggctattaattactgcctcaatttcagaacttgttattggtctattcagggatttgacttcttcctggtttagtcttgggagggtgtgtgtatgtgtccaggaatttatccatttttttctaaattttctagtttatttgcaaagaggtgtttatagtattctctgttggtagtttgtatttctgtcagatcagtggtgatatcctatttatcatttttattgtgtctatttgattcttctctcttttctttattagtctagctggcagtctatgtattttgtctatgttttcaaaaaacagctcctggattcattgattttttgaagggttttttgtgtctctatctccttcagttctactctaatcttagttatttcttgtgttctgctagcttttgaatttgtttgttcttgcttctatagttcttttaattgtgatgttagggtgttgattttagatcctttcagctttctgatgtgggcatttggtgcaataattttccgcttaacactgctttagctgtgttccagagattctggtactttgtctctttgttctcattgctttcaaggaacttctttatttctgccttaattttttctttttctttttttttttttttattgatcattcttgggtgtttctcacagagggagatttggcagggtcataggacaatagtggagggaaggtcagcagataaacaagtgaacaaaggtctctggttttcctaggcagaggaccctgcggccttccgcagtgtttgtgtccctgggtacttgagattagggagtggtgatgactcttaacgagcatgctgccttcaagcatctgtttaacaaagcacatcttgcaccgcccttaatccatttaaccttgagtggacacagcacatgtttcagagagcacagggttggcggtaaggtcatagatcaacaggatcccaaggcagaagaatttttcttagtacagaacaaaatgaaaagtcttccatgtctatttctttctacacagacacaacaaccatccgatttctcaatcttttccccacctttcccccttttctattccacaaaaccgccattgtcatcatgacccgttctcaatgagctgttgggtacacatcccagatggggtggtggccgggcagaggggctcctcacttcccagaaggggcgaccgggcagaggcgccccccacctcccggacggggtggctggccgggcgggggctgaccccccacctccctcccggacggggcggctggctgggcgggggctggccccccacctccctcccggaaggggtggctggccgggcgggggctggccccccacctccctcccggatggggcggctggccgggcgggggctgacccccacctccctcccggatggggtggctgccaggcagagacgctcctcacttcccagacggggtggctgccgggcggaggggctcctcacttctcagacggggcggctgctgggcggaggggctcctcacttctcagacggggcggccaggcagagacgctcctcacctcccagacggggtcgtggccgggcagaggcgctcctcacatcccagatggggcggcggggcagaggcgctccccacatctcagacgatgggcggccgggcagagacgctcctcacttcctagatgggatggcagccgggaagaggcgttcctcacttcccaggctgggcagccaggcagaggggctcctcacatcccagacgatgggtggccaggaagagacgctcctcacttcccagaaggggtggcggccgggcagaggctgcaatctcggcactttgggaggccaaggcaggcagctgggaggtggaggttgtagcgagccgagatcatgccactgcactccagcctgggcaccattgagcactgagtgaacgagactccgtctgcaatcccggcacctcggggggctgaggctggtggatcactcgcggttaggagctggagaccagcccagccaacacagcgaaaccccgtatccaccaaaaaaaatacgaaaaccagtcaggcacggcggcgtgcgcctgcaatcgcaggcactcgtatttctgccttaattttattatttacccagtagtcattcagcagcagattgttcaatttccatgtagttgtgcagtttggagtgaatttcttaatcctgagttctaatttgattgcactgtcatctgatagactgtttgttatgatttcagttcttttgcatttgctgaggagtgttttacttccaattatgtggttgatttcagaataagtgctatgtggcactgagaagaatgtatattctgttgatttggggtggagagttctggagatgtctattaggttcgtttggtccagagctgagttgaagtcctgaatatccttgctaattttcggtcttgttatctgtctaatattgacactggggtgttaaagtctcccactattattgtgtgggcatctaagtttctttgtaagttactaagaacttgttttatcaatctgggggctcctgtattggctgcatatatattaaggatagttagctcttcttgttgcattgatccctttaccattatgtaatgcccttctttgtcttttttgatctttgttggtttaaagtctgttttatcagagactaggactgcaatccctgcttttttttttttctttccgtttgcttggtaagtaaatattcctccatccctttattttgagcctatgtgtctctctgcatgtgagataggtctcctgcatacagcacagtcttgaccctttatccaatttgccagtctgtgtcttttaattggggcatttagcctatttacatataaaattaatattgttatgcgtgaatttgatcctgtcatcatgatgctaactggttatattgcacattagttgatgcagtttcttcatagtgtcattggactttatagttcgatgtgtttttgcagtggctggtactggtttttcctttccatatttagtgcttccttcaggacctcttctaagggaggcctggtggtgacaaaatccctcagcatttgctcgtctgtaaaggattttctttctcctttgcatacgaagcttagtttggctggatatgaaattctgggttgaaaattcttttgcttttttttttttttttttttttgagatggagtctcgctctgttgcccaggctggagtgcagtggcatgatcttggctcactgcaacccctgcctgtcaggttcaagtgattatcctgcctcagcctccagaataggtgggattataggtgcctgccaccatgcctggctgatttttgtatttttagtagagataggatttcaccatgttggccaggttggtcttgaactcccaatctcaggtgatccaccctccttggcctcccaaagtgctgggattacaggcgtgagcccaaaaaccgggcgtggtggcgtgcacctgtaatttcagctactcgtgaagctgaggcaggagaatcgcttgaacccaggagttggaggttatggtgagccaagatcgtgccattgcaccccagcctgagcaataatcaaaactctgtctcaaacaaacaaaaaagaatattgaatattggctcctactctcttctgtcttttagtgtttctacagagtgttctgctgttagtctgatagacttccctttgtaggtaacctggcctttctctctggctgcccttaacattttttccttcatttcaaccttggagaatctgatgattttgtgtcttggggttgctcttctcgaggagtgtcttagtggtgttctttttatttcctgaatttgaacgttggcttgtctttctaggttggggaacttctggataatatccacatcactttcaggtacaccaatcaatcataggtttggtttttttacatactcccatctttcttggaggctttgttcattcctttttgttattttttctctaatgttgtcttcacgacttattctattgagttaatctccagtctcatatcctttctttcgcgtgattgatttggctattgatacttgtgtatgcttcgcagagttctcatgctgtgtttttcagctccatcaggtcatttatgttcctgtctaaactgattattctagttagcaattcctctaaccttttgtcaaggttcttagcttccttgcattgagttagagcatgctcctttagctcagaggagtttgttattacccaccttttgaagcctacttctgtcaattcgtcaatctcattctccgtccagtttttgtttgtttgtttttttgagacagagtctcgctctgtcgcccaggctggattgcagtggtgcagtcttggcttactgcatcctctgccacctgggttcaagcaattctcctgcctcagcctcccaattaactgggattacaggcacctgccaccatacccagctaatttttgtattttagtagagacagggttttaccatcttggtcaggctggtcttgaactcctgacctcaagtgatccacctgcctcagccttggcctcccaaagttctgggattacaggcttaagccactgcacccagcctgctccatccagttttgtgcccttgctggagaggggttgtgatcatttgaaggagaagaggcattctcattttttgaattttcagtgtttttgcactggtttttactcatcttcatggacttatctacctttgatctttgaggctgatgacattggatggggtttttgtgtggtggtcctttatgttgatgttgatgttgttgctttctgtttgttagtttttcttctaacaggcctctcttccgcaggtctgttgcagcttgctagaggtccactccagaccctgttcacctgggaatcacaaatagaggctgtagaatggcaaaaattgcttcctgctccttcctctggaagcttcatcacagaggggcaccagcctgatgccaaccggagctctcctgtatgaggtttctatcgacccctgttgggaagtctctcccagtcaggaggcacaggggtcagggaccaacgtgaggaggcagtctgtcccttagcagagctgacgtgctgtgctgggagaatccctcttgtcagggtcacctgctctcttcagagccagcagtcaggaaggattaaatctatggaagctgtgcccacagcaaccccttcccccaggtgctctgtcccagggagatggggattttgtctgtaagcccctgactggggctgtctcctttccatccgagatgccctgcccagcgaggaggaatctagagaagcagtctggccatattttggcagcccacaaatcctcccagcctccttagcactagaaaactgcctactaaagcctcagtaatgggggatgcccctccccccaccaagctcgatcatcccaactcaacttcagactgctgtgctgtcagtgagaatttcaagccagtggttcttagcttgctgagcttcatgggattgggacctgctgagcgagaccacgtggctccctggcttcagcccctttctaggggagtaaagggttctgtcttgctggggttccagatgccactgtggtacaaaacaaacaaacaacaacaacaaagcaaaactcctgcagctagcttggtgtctgcccaaatagccacccagttttgtgcttgaaacccagggctgtgctggtgtaggcacaccagggaatcccctgatctgcagattgcaaaaatcatggggaaaggatagtaacctggccgggtagcacagttcctcacggcttcccttggctgggggagggaggtcccccagctccttgcacttcgtgggtgaagcgatgccccaccctgcttctgctcgccctccatgggttgtacccactgcctaaccagtcccagttggatgaactgggtacctcagttggaaatgcagaaatcacctgtcttctgcatgggtctcgctgggagctgcagactggaaatgtttatttggccctcttgaccctgtcccccaaatcatcttttatttttatttcatccaaatagctgctatcttttttttgtacatctttgcctaaattataataagaacaacgatctaaatttgcatagcaagtggaccctatatttggaatttaaagagtttctggcaaaatttagattaaattggctaattaataacacttttcaaattgctttcccctgctccaataatgaagtataacttctagaaacagctgaaaaatgaattgttcttcgggttatatgctcttaatgttacattgaaacagagtatgaaggcttgaaaatatccgaagggagaaaatggaatcagcagtgatcctgctgtgacctcactacttagtagttatgcttttagccaattcgtttacttgtctttaaactgcacatttctggcagggcagcactaatcactgatcaaaactacctttttttttttttttttttgaggtgtagtctcgctgtgtcacccaggctggagtgcagtggcatgatctcagctcactgcaacctctgcctcccgggttcaagggatcctcttgcatcagcctcccaagtagctgggattaaaagcgtctgccaccacacccaagtactttttatatttttagtagagacggggtttcaccatgttgaccaggctggtcttgaactcctgatctcaagtgatccacctgcctcagcctcccaaattgctgggattacatgcatgagccaccatgcctggccaaatctacctttaaaaattgtgcaggagggaaaggctttaccaacagtgattagttcaaaaaacttcaactctaggcctggcgcggtagctcatgcctgtaatcccagcactttgggaggcctaggcgggtggatcatgaggtcaggagattgagaccatcctggctaacatgatgaaaccccgtctctacaaaaatgcaaaaaattagccgggcatggtggcgggagcctgtagtcccagctactcgggaggctgaggcaggagaatcacttgaacttaggaggtagaagttgcagtgagccaagatcacacaactgcactccagcctggtgacagagtgagaccccatctcaaacaaacaaacaaacaaattaaaaacaaacaaacaaacaaaaaacttcaactctacctcctggctggaactcatattgtagattgcaaaagcacagaattaacatcataatactattgaattcaaaaagaaatctagaaacttcagggaatccagagaagatagagcagatggtctgaatagtcaccattcacattttgctttgttttggtaactattactatcacttaattacatagggtgaatataagaaaattgcctttttcttattttcagtgctaaccctaaaatggtaaaactcttgcaggttgaaattaacagcttctcagtggcccttcaacagaaggttaaagggtagcgaagttgcctctgtaatttccagggtgaacaaatctgaactcagttcttgcagttcccaaattcacagctatcttgggatatgttgatttgtgggctgcaaaatatgagaaattctacctcagagaattctgtttataaaaacttattcgcatctaataatctgaagagatataaacacagcaatgttgttacaactacctgttaattgttaatccttggaaaaagaattgataattatttctgaagacatgaaaagcttcatataataaacaatagactctcaaatgtaaatcagtttttatttttaatttggagaagttaataataataaattgccagcaataaaaaataaatcattcatcaccgttaccgtgttactaatggctggtccatataggtttgcagtgattttggttcttccattctcaaaagaaataatccagcccagagacgaagagtgggtttgaagcataagtggggggttgttgaaaggaaataaagtacccttgggaaagaaccaagggtgtgacttgagagatcaagtgccagagaaaggtcatataccagttaaactccaatatttggcctctcagtgtgcatgcttgggtgtcttgcccaatatttgagattttatgaaacagctgctgcccctgagctcaggatgtgttctgtgtttaggaggtttccccctccctggtaccagctgagaccatttgtcaatcctgagctgaccacctgataatcacctgacattcctggggcacattcccagggtctctaccttaccccactcattactatctgactacctgctctaactgggtgatcaagaatattcttttttctttttttctttttttaagatgcagtttcacttttgttgcctaggccagagcgcaatggtgcgatctcagctcatcacaacctccgcctccccagtccaagtgattctcctgcctcagcctcccaagtagtgggattacaggcatgcatcaccacacctggctatatttttgtatttttagtagagaaggggtttctccatgttggtcaggctggtcttgaactcccgactttaggtgatttgccccaggtgattcgactgccttggcctcccaaagtgctgggatacaggcataagccactgcacctaccctagatattctactggccttggagctttcggtgtctaaaacttttaccaatcaatatatgcagtccatcaactttcttaacttttattgttagtatgaacttgattttttttgttgatacactagttaagattttattttatacttaaaaatttatttattagtggtttagacaactcctctttctgacaactccatctaacttctaggtataaggcttcctgaggatatattgtaagtttggctttgaatattccacactgagaaattttgaaagcattctaattaaaagaattaaattcaggctgggcatggtggttcacacctgtaatcctagcaatttggaaggctgaggcgggtggatcacttgaggccaggagtgcaagaccaggctggccaacatgatgaaaccccatctctactaaaaatacaaaaattagccaggcatggtggtgcatgcctgtaatcccagctactcagggggctgaggagaatcacttgaacccaggaagcagaggttgcagtgagccgagatcatgccactggactccagcctgggtgacagagtgagactccatctcaaaaaaaaaaaaaaaaagaatttaattcaatctcagctccctgcagcctctgcctcctgtgttccagcgattatcctgcctcagtctcccaagtagttgggattacaggtgctggcaatcacacctggctaatttttgtatttttagtagagacggagttttaccatgttggccaggcttgtctcaaactcctgacctcaggtgacccgcccacctctgcctccaaagtgctgggattacaggcataagccaccatgccctgccagggagttcttatcttgataaaggattacatgagccctctaaaagatgtttgtttaaacattataggtggtggcagcagtagtgggcaaaggtgtagtgtgcagcacttgattattttactgctgtttctgctgagcctgtggcagcccagccctgtgtgcagctctctccctgccccatgatgccaccacattccacctgctggcatggagacatgcacctgaggtggaccctaggagcccggcctaagatgggctcctactgctgctgcttgggctgctggcctcaggactgcaggaaacttgggggacaccagggcactgagaacagccacactggcataatcaacaccttcttctggaacatccattgtcccctcctgttgtgaggagacaatgtctactgctcagaagctcttgacccagctgactgaaaagttcgtgtttagcgaatatatttctacagacattgtggagagtgtggtcagaaatttacagatttaatgctattcctatcaaactaccaaaacattctgaacagaactaaaaaacactattttaaaatttacatggaacaaacaaacaaacaaaaccccaaatagccaaccaatcctaagcaaaaagaacaaaactagaggcattacattacctgacttcaaactatattacaaggctatagaaacccaaagcagcatggtactggtacaaaagcagacttacagaccaatgtgatagagagagctcagaaatgccacccatttacaaccatctgatttttgacaaagctgatgagaggaatgtgtgaagaattctctagttaataaatggtgctgggataactagctagcactatgtagaagactgaaaacggaccgcttccttacaccacatacaaaaatcaactcaagataaagacttaaatgtaaaatttaaaattataaaaaaaaaataggccaggtgtggggctaacacatgtaatcccagcactttggaaggtcaaggcaggcggatcacctgaggtcaggagttcgcaaccagcctggccaacatggcgaaactgtgtctatactaaaaatataaaaattagccgggagtggtggtaggcacctgtaatcccagctactcaggaggctgaggctgaagaattgcttgaaccagggaggcagaggttgcagtgtgctgagattgcgccattgcactccagcctgggtgacagagtgagactccatctcaaaaaaaaaaaaaaaaaaattccctggaaggtaacctaaataataccattccagacatagaaactggcagatattttatgaagaagataccaaaagcaattgcaaccaaagcaaaaattgacagatggaaccttattaaactaaagagctttttcacagcaaaagaaactatcaacagagtaaacaggcatcctacagaataaaagaaaatatttgcaatctatgcttctgacaaagatctaatatccagaatccatgaacttaaaaaaacttattaaaaagtaggcaaaggacacaaacagatctttttttttttttttgagatggagtcttgctccgtctcccaggctggagtgcatggtgctatctcagctcactgcaacctccgcctcccgggtgccggttcaagcaattctcctgcctcagcttttggagtagttgggattacagccatgcaccaccatgcccagctaatttttgtatttttagtagagacagggtttcaccatgttggccaggctggtcttgaactcttgacgtcgtgatccacctgcctcggcctcccaaagtgctgggattacaggcgtgagccaccacgtccggcctgaacagatgctttttaaaaaaagacatgtgtgtggctaaaagcatatgaaaaaatgctcatcaccaatcagtagagatatgcaaagaaaaaccacagcaaaatactttctcacaccagtcagaatggctattactcaaaagttaaaaaatgacagatgctggcaaggttgtggagaaaagggaatgcttacacactgctggtgggagtgtaaattagttcaaccatcgtgaaaaccagtgtggtgattcctcacagaattaaagacagaattaccatttgacccagcaacctcataattgggtatatgcccaaagaaatataagttattctgtcatagacatgcatgttcactgtggcactattcacaatagcaaagacatggaatcaacatgctcatcaaaaatggcagactggataaagaaaatatggtatggctgggcaaagtggctcatgcttataattccagaatgtgggaggtcaaaacagatggattgcctaagttcgagtttgagaccaaccaaggcaacatttgttggtctacaaaaaatacagaaagaaaaattagccagtcgtggtggtgtgcacctgtagccccagctacttggagagctgaggtaggaggattgcttgaatgcaagatgttgaggcttcagtgagccaagattgtgcccatcacaggacagtgggcgcccagactccagcctgggtctccccccaaaataaaataaaatatttaaaagaaaatatggtacataaacatcatggaatactgtgtggccataaaaaaagaacaagattatgtcctttgcagcaacatgaacagagctgaagcccattatccttagaaaactaatacagaaagagaaaaccaaacgcatgttcttatttataagttaagagataataacaagaaaacatgaggccaggtgcggtggctcacgcctgtaatcccagcactttgggaggctgagacaggtggatcacgaggtcaggagatcaagagcaacctggctaacacagtgaaaccccgtctctactaaaaaaaaatacaaaaaaaaaaattagctgggcgtggtggcaggcacctattcgggaggctattcaggaggctgaggcaggagaatggcgtgaacccggggggtggagcttgcagtgagccgagatcatcatgccactgcactccagcctgggagacagagtgagactctgtctcaaaaaaaaaaaaaaaagaaaaagaaaaaaaaagaaaaggaaacatggacacaggctgggcacggtggctcacacctgtaatcccagcactttgggaggccaaagtgggcagatcaccagaggtcaggagttcaagaccagcctggccaagatggcaaaacctcatctctactacaaatacaaaaattagccgtgcatggtggtgcatgcctgtaatcccagctacttgagaggctgaggcagaataatcacttgaacccaggaggccaaggttgcagtgagtcgagatggcaccactgcactccagcctgggtgacagagcaagaatctgtcttaaaaaaaaaaaaaagaaaaagaaaaggaaaccatggacacaaagagaggaacagacactgaggcccactttggagtagagagtggaaggataaagatcagaaaaaatacctgttgggtactatgcttagtacttcagtgataaaataatctataccaaatttccatgacagttttatctatataataaacttgcacatgtacccctgaaccaaaaataaacattaaaaagtaaaaactccattagtgggggagagtctaatgtaggcagaagaactggtttgtgctatttctgggtccatgtagactgatgaggttatgaacaggtggcccagaaccctaggtggagaaaacaggtttctgctgcagattcagtgtctgggtgtggggatatgccagacttatagacacttttgtgggtttttggcaagaaacactagaatgaaaaatgccatggtgaagttcctgatggtggtgtctagtccggggaggggtgtggacatgtcaatgtctagtgggtatgtttatgagtgggtgggaatactgtggtggcagctgtgggaaaagggggactgtcatcagagctccttaagttttcatcctctctcactctgggaggagacctagaatcacaggacaatgggcagcgtgacagcctgtgtacaggagagcagagcctcccattcccagacaccgagcgattagtccaagccaggattccatatcttttctctgtcaccaaatgtgtagagttagctgtacaccaagcaattctgcaacaccaactaattgtccaacatttgaattctgaccctacccagagtcagcacagaacctgattccaggcttagtctcaatacattgacctcacagcagatgccaatcacaaaccccttgggcccatctgtgcttgtaagctactgtttaaaaattcagaactcccataagctccctgaagttcaataatttgatagagctactcacagaactcagcatgtttaccagtttattgtaaaagccacaacccaggaaaagtcaaatggaaaaaacatataggaccaaaaaaagagctgggaaaaaatgaagcttatacataatcctagaaaatagctgtgattaataaaattatccatccatcgtgtgctccaggaacagcttatggaaagaaacacccttcccattatgacttagatggtgctgtcttttcttacctatcacatagccagacacagactctgcacattttcttcttgttctcaaaaaaaaggtgccggacacagtggctcacacctgtaatcccagcactttgggaggccaaggcgggtggattacctcaggttgggagtttgagatgagcctggccaacatggagaatccccatctctactaaaaatacaaaattagccaggcgtggtggcgcatgcctgtaatcccagctagtcgggaggctgaggcaggagaattgcttgaacctgggatggggaggttgcagtgagccaagatcacacgatagcatttccagcctgggcaacaggagcaaaactccatcttaaaaaaaaaaaaaagaggaggtgaatttgtcctcagtggtcaaaataaaacacttataaagcaaacttcagttaagtttatctccttcccacagattcctgaactttgagctaccttcactttgagtcaacataaaacttcattttatatccctcctaagaacatgctgacttcagggaaaaacattctctgatctaaaatctgatttttttaccctccacttgccattgccctcccaacttctttctaatcttgtttgctcctccctatgaaagaaagcccttgtctgcctaaactttgcaatccttaaagatcttatagttggtacttcctcctgttgcaatgctcctttgtacactgaattttcttacataaatccaactttatttttaaaagtcaagaaactgcctcaaaacagtaacaagttcatctttggtaatattctcccagtctccttttatcttaaccttactagcatctgcctgtgggtccccagctttccagggctctgtagcttccctcaggattaaggcttcttttatagctgggctgagcaggctgggacttctgcaggggaggctccccagaaagaactaactgggcccttaataacctccttttgcaggctcaacattagttttttcttggagtcactgggctcaggctttaatttccatgtcagagttatacacttgatttttgaaactaagtgtttgaaaaattcagcaaaattactcaaacacagtgttcatacatggaaaataaattataaggtgcttacttttttttttttttttttttgagacagagtctcactttgtcacccaggctgtagtgcaatggcacagtcttggctcaatgcaaactctgcctcctgggttcaagtgattgtcctgcctcctcagcctcctgagtagctgggactacaggtgcatgccaccacacttggctaactttgtattttacgtagagacgggtttcactatgttggccaggctggtctcgaactcctgacctcgtgatctgcccgccttgacctctcaaagtgctgggattacaggcatgagccatcgcacctggcctacattttatacctcaataagaacagcaaaagtatctatttctttcagataataaatttattattgtattatttctattaaaaataatgtagtaaacaattagtcatagggaaaaacttctaggaggtaccaagtttcatctcatgaaatttagtatgaaactcagaaatcaagataacaggatacagaacagagatattcactctcagaaatttaccctgcagaaagaggaactaatgttttataaatttatgtaactcaccaattatctacaatatttcctcgtggaaatgtattcattttctacagccaaaatcgaaggagattttccctattattttccttggtagcattctaaaagctgagccttggaattctgtttgaaatcacctacagaaaacacacctgagaaaattcctaaactctctctgggaaagaaaaaggtaagtaagaatttttaacatacgaaatatatgattagatattaatattttttgaaacccaccacttttatgccctttgtaaatgtttttgaacctttcaagctctactaataaaatgcaatttacagtttaagaaattgaaatcaatataagtgaacaaatcttttcaaggtgacgaacccagggtgtagcagtgatgattaaaaaacagatgtgtctgacttatgtgtcaagtcaggtcatccaatcacgtgagagattctcccaccccagcctgctcacttaactgctcaatgactaacctctcaggagacactgcactatgttccagtgagtggcccaggttttactttcggaaatttttgcagcatctctctggggtcaggttttcttttgttttttttttaggggggatactattttttctttcacaaatcttagagaattcaggggacagaaattatttctgttttccccttaataccagcctctgattggctgaccagcaatgtgtcaccaagatatgaaagctgggttgggtgaaaacaatgttaatgtctcaaggggttacttttttaaaggaagagcacaccaggagatttctctcagccccagtgcatccatctgcttccttgagaggctacactccatacctcaggctgtcctatgaaagaaaatgacccaggacctgagattccctagacactctagcagacatagccatggctgatataatggtttattcacagacagtactgaaaccgatgaccaagaaaaaactaaagggtggttgaggacacatcacccaataaagcttccccccgccaaaaaaaaacctttaccccaaagcattctggtaagatctctgcctagggaaggtaaaaggaaaagaggcacagagattttacacaacacagtgtcaggggttattctttgctttcttctcatgggaaatatttacaaacagaaaatgaatcttttaaaatgtgccatccagtggtttgtaaaaaaaaatacagtattgaaaatatacactaaaggacaaatagatgacaatgtgaactagggaaacgaggctggcatttgggattgtcagaaggaactggaaatttagtattttacttcaagcctgagttaggctggaggaatgggggatgagggctagacttgagaccgcacttgggacacatttaaaaaattcaggggaaaaaaaaaatcagtctcttgtgaagtgtgtatcctcaaacatatattttttttttttgtaaatttttgtaaattgcattggggaaaacaaaatttaagcttaaccaactaactataaatggccaattaagctctgattacataaccagaaaatttacacactcaaagtggaaattaagaaagtacgtgactccctgtagtcccagctgctcgggaggttgaggcaggagaatcgcttgacaccgagaggttgcagtgagctgagatcgcgccactgcacttcagcctgggtgacagagcaaaactgtctcaaaaaaaaaaacaaaaaaaagtaggtaactgtacctaaccgattattgaatttgtttttttttttttaatcatggaccttataaaagtctttccttcaagttcctcccatgaaccacaaactaaaacccatagctgggtactctacaatttttgagccactctttgattaaattctttaatctttttgcggtgactccataaatttttaatagatgaaaagagggactaggaaccccaccgaccaaaactcttcccattcatgaaccctcacccgagtcgggattctcccctgactaccctcccatggtccctgcacaattggccagagacaaggcgctgcggctgcagagctgcccagagaggcctccaggccaggggaccatcactgggtcactgtgcagacaggacgcccagtgtggggaaaagcaagagagatcagattgttactgtgtctgtgtagaaagtagacagacataggagactccattttgttttgtactaagacaaattcttctgccttgagatgctgttaatctataatcttacccccaaccctgtgctctctggaacatgtgctgtgtcaaactcagggttaaatggattaagggttgtgcaagatgtgctttgttaaacagatgcttgaaggcagcacgctccttaagagtcatcaccactccctaatctcaagtactcagggacacaaaaactgcggaaggccgcagggacctctgcctaggaaagccaggtattgtccaaggtttctccccatgtgatagtctgaaatatggcctcgtgggaagggaaagacctgaccgccccccagcccgacacccatgaagggtctgtgctgaggaggattagtataagaggaaggcatgcctcttgcagttgagacaagaggaaggcatctgtctcctccctgtccctgggcaatggaatgtctcggtataaaacctgattgtacgttccatcgactgagataggaaaaaaccaccttagggctggaggtgggacatgtgggcagcaatactgctttgtaaagcattgagatgtttatgtgtatgcacatctaaaagcacagcacttgattctttaccttgtctatgatgcaaagacctttgttcatgtgtttgtctgctgaccctctccccactattgtcttgtgaccctgacacatccccctcttggagaaacacccatgaatgatcaataactactaagggaactcagaggctggtggaatcctccatatgctgaacgctggttccctgggtccccttatttctttctctatactttgtctctgtgtctttctcttttccaagtctctccttccacctaacgagaaacacccacaggtgtggaggggcaacccacaccttcagcccagggtcctgctgtcagcgcagccaccatgctatggctgaagaggactgaggctgagttggccaaggagaactcggggcgcagactgtggagctgactgacgggagacccgagtcccaccacagccacttgccaccagttccaatcaactccttcccttttctcaggatgtcggacccggcactctcaccatttctaggcttccagggggtcctggcatcttagctgtggatctcccaatacctgcaggtcacaaagtcacggagactgggcctctgaagactagacgtagaactccagctgcagccggagacaaaggcccccatattccggaagctgtcttgcccgctccagctgcgtggctgattggagggtttccagcccagtgttgctgattggataacgcttaaatccccgcctcctcacatcgtgattgacagaagatgtgaccaaacgctaggctgaatgaagaaagagtgactgcctaagctgccgcccgctcagaaagggcttcgtccctgagctgagccaggcccaccctagagggtgtttgcatgtaatcttgtgtataaggttatatgcatttataaatattatactgtatggctattcacaaatgaaaagaatataataataatgattttgaaatttcaggttttataaccttcctggctttgagaaggcagcatgagattttttgtctttgtttttgttttttgagacggagtcgctctgttgaccaggctggagtgcagtgacgcgatctcggctgactgaaagctccgcctcccgagttcacgccattctcctgcttcagtcccctaagtagctgggactacaggcgcctgccaccatgcctggctaattttttgtatttttcgtagagacacgtttcaccgtgttagccaggatggctcgatctcctgacctcgtgatacgcccacctcggcctcccaaagtgttgagattacaagcgtgagacactgcatccgtctgttgtaacaatttaattaaagcaatatatccaaaatattattttaatatgtgagcaatgtataattatgaatgagatatatatttatatataacataattatgtatctatatattgcattatgctatgtatttttatccatattatatatagatatttttatctatatgttgtatatttttatatttatggaactaaatctttgaaactaactctgcattttacctttcttgcaaattgcagctcagaccagccacattccaggctcccaggagtcacacatggtcaatacctgtcacattgaagtgcagctctgttgtcaggtctgtgaaaggcctgaatatcccttttcttcctgttaggaataacgctcaaaatcataaggaaattgaacactcgaacaaaggattcctagcaaagcaattttagttctgcacagaggggtgcgttcttgtccagtcaccatgagagcacacctgaacaaaggggcacaagagcctttattcctgacacaagtcctgcccctgtaccctttccccattggccagggtcgggtcgtacaatctgaactaatcctggttggctaaacatttgatttttttagataaggtgggcatgcaaaagaatgcagagaggaaggggaaggggtgtctgcattgagctagaaagttagtcctctttccaaataagggaagaaatgtgagctggtactgataatgcctggtactgtggcgtgcctgggcatctaacaaaggcagaaaggaaaaaggagaaaaaggaaaaaaaggggtgtgtgtgtgggtactatgaattaaagaataaaagattgatcaggctatttgaagagaaacctcatcgtatcccacatgcccgacatgagggaacagcctctttctactaacatctgtcttcagtttcaagggtggaacagatagtggtcatagaaagagcagaaggtaacaagaataaaataaccacaggtagaccactgaagaatgatggggccacaggagaacaaaactctatgtcttcagacctgtccacagtattgacctccaatttttagatatgaagaaaatagattaaaggcaaactttggctatttggccttggccataatggtcaggctctggtcatcggttttttcctgtggtgtgggggactgtgtgcatataagcaccaatcacatgcatacatgtctacaagtattcctgcatcagtcaacattgccttacaagacatttaactttaaatcgggaaaaatgtcagtacctttagggtgcccattgttagaaggtgactaataatcaaactgtctttaaatcttgacacccaatctgcactgggtgcatgtattagttaggtatggcagcataacaaatcatccaaaacttattagctcataattgagatggtccgccatttaggctaggctcagtggggccattcttctgttcccagctgagctccttcagacatgtattgtcagctgtttgttgactaggcagctgtgcttctgggagtgagcttgtgcttcaagatctgtcaacaggggcaccttgctactcctcctcgtggtattttatcctctaggtggctaacatggactttattgatggagacagcagcattctgaaagaaaagcagaagcattcaacaccatttgagcccaggccccaaactagcccactgtcatgttcacaagtatctagtgccttgaacaaataaggccagccagatctagggttgggaaaacagattctgtatctcaatgggaacagctgtaagagcacctgccaataggcatggataggagggatgaaaaattgctaccatttttgcaatcaatatcattatgccttttttgcatatgtggtttatacaactctttcgcatcaagaaacttgtccaaagactcacagctactaaatggctggcctgagactcagtaccaactcttctgactctaaagcccatgcatcaaactcttggctgctgtagatccttgaaatcctggagagagatgctgctacagtaaaagccagatttttaaaaaatgtatgcccatatagcactatttatgattgggaataatcctttcaagaaattgcagaagcacagggtgcctcacacctgtaatcctagcattttgggaggctgagatgaaagaatcacttgagttcaggagtttacgtgcaacctgggcaacatagtaagatcctgtgtccgtgaaaaaaaatttaaaaattggccagtcatgatgttgcatgtctgtcgtctcagctcttcgggtggctgaggcaggaggattggttgagcctgaagtgttaaggttgctgtgagacatgattggttgcaccactacactccacccagagtgatacagagagacactgtctcaaaaaaattgcagaagcatttgaatggacatataataattttgaaaaatagctgaggaatgagtttagaaaaatcaaagcccaagaacacattatttattttcatcatagaaaaaagaaaaagaaactttagagaaattaaatttatcagagtttaattgagaaaagaatgatttgcaaattgggtagcctgtgtaggctcagagagtctccagcatagccacatggtggtaaaaaatttatgaacagaaaaggcaaattgacatgcggaaaatggaagccaggtaccgaaacagtcagattgattacagcttgggagttgccttatggtttgaacagttgacgtcattttactggccaaaacacattgattggtacaagaatgggtacagtctatttacatatccaggtaggtttcagtttagtattttaaataaaaacgaccaaaattaaacgtgaaagggggcagctttatggtgtaattaatttaataatttgtccttttggtcatcttaattttgagagatagaccaaaactttagacattggccgggcgtgatggctcatggctgttatcctagcattttggaaggccgaggtgggtggatcacttgaggtcaggagtttgagaccagcttgaccaacatggtgaaaccccgtctctattaaaaatacaaaccaattagccaggcctgttggtgagtgcctgtaatcccagctactcaggagactgaggcaggagaatttcttgaacccgggaggaagaggttgcagtgggctgagatcgcgacactgcactccagcatgggcaacagagcgagactccatctaaaaaaaaaaaaaaaacttggatattgatattactctctcactataaaagaagtacttatttagtctgaaatcccactgtgaaatagcataactgtggattttttaaagtagaaacaaggacttcaggttattattattttattattattatttatttttaaaagagtagagggaaactccttgtgttgaaatgtgctgtttaccaaaacaaacagacaaacaaacctcatctgttttaggatgtacctattttcttttttctttctttttgtttttgagattgagtttcactattgttgcccaggctggagtgcaatggcgccatctcagctcactgcaacctccacctcccgagttcaagcaatcctcctgtctcagcctcccaagtagctgggattacaggcatgtgccaccacgcccgcctaattttgtatttttagtagagatggggtttcactatgttggtcaggttggtcttgaactccaggcgtcaggtgatccacccacctcagcctcccaaagtgctgggattacaggcatgagccactgtgcccagccctacctattttctgaaattttcaatttgattatgtcacatttagcatgagtgacttactttttttgttttgtttttctgtttgaacctagtgcagaagttaagaatgatggcctccgataaatttgtttaaaaaattctcccattttggcaaagttctcacatagatcagagtgtaaaaaactcacgatcttagtgccactgtcaatttccattatttttgggttttgtccatattatgtcattcataggttatggtgtctccatagtcacatatgtctcaattgttgtcattctagttaaagagagaccatttgtcattctagagatgactcatgcatgataacatttaaaacttttgagctgaggtggaaggattacttgagcccgggggtggaggttgcagtgagctgagatcacacccctgcattctagcctggctgacagagtgagaccctgtctctaaaatgcaatgcaacgcaacgcaacgcaacgcaacgcaacgcaatgcaatgcataaaatagcctcaaccatgttccaacaattactttcttttttcttctccaacaataaccataaccttttttttttttttttgagacagagtcttgctctgtcacccaggctggagtgcagtggcgcaatgtcgactcactgcaacctccacctcccaggtttaagaaattctctgcctcaccctcccaaatagctgggattacaggcacgtgccacctcgcccatctaatttttttgtatttttagtagagatgaggtttcatcatctgggccaggctggtcttgtactcctgaccttgtgatcctcttgcctcagcctcccaaagtggtaggattacaggcgtgagccattgcacctagacaataaccataatcttaagagttaacattgtagatcaattttgtgtttttattcaagtgttttgttacaaaaaattaaacatatgcaaaacaacaacaacaaaaataatttaatagacctatcatgaagcttcaacaactactaatcttgtgccattctggtttcacctattcttctctacttcggtcatccctggccaacccattgtccacccttcattattttcttcagttttgttttttgtgacgtcatatgtacatacattggaaggcacaaatcctaactgaagatttttgacaaataaatacacccatatgaccttcatatcttttaagaataaatagaatgtttcccttctctattaatagaatttataataaaatgatagaatattcttattattctcagataattccctcctgcttttttcagacaattttaatctctaccgaggctacttggtattttttttttttaccattagttcatttttccagacattatacaatttgtattattttatttcaagcttgtctcagcaggtttatgagattcatccaaggtgtgtgcttcagtttgtttctttctatggctgagtagccttctcttgtatgaatgagctatgatttgtttattcatcttcctagacatggacatttgggttgttttctgctttaagctattatgactaaaaggtctataaacattctggtacaaatactttttcatatataatttaatttctttactagcatttaaatgacaactctttacattttttagtggtttctttagggataaccatatgcatctttaacatatcacaatctacctagagttaatactgtacaattgtaataaatgtaaaatatgaagaccttgctatggatgagctttacttacctccttttatttttatgctattcataaattttacatctacacattctatatctcacaatacttacaatttctcctttagtcataagtcttataaagaaattaagagaaaatggtattataaatatttggaggcagatattttgggctatgtaaatacactgtttctcctttaaattttacccacaatttgtgcattctttaatacatctttatctacagtaattattactgtggtgtcctggtagtgatttcctattttgcattatctatctacattgattagtacttagaattctgttaagaagatttgctttggccgggcgcggtggctcacgcctgtaatcccagcactttgggaggccgaggcgggtggatcatgaggtcaggagatcgagaccaccctggctaacaaggtgaaaccccgtctctactaaaaatacaaaaaattagccgggcgcggtggcgggcgcctgtagtcccagctactcgggaggctgaggcaggagaatggcgtgaacccgggaagcggagcttgcagtgagccgagattgcgccactgcagtccgcagtccgacctgggcgacagagcgagactccgtctcaaaaaaaaaaaaaaaaaaaaaaaaaagatttgctttttctctttcttctttccttttttcttattatattttgtctatatctgcatggactcatgtatagctcttttattctctaggttataatccaagggtattattattttgtttctcacattgtttcagcttgggctgctggaaactctttcaggttcacttcctctgacatgtctctttctgttgttcataaagcactttttaactttctagctttacaaaatactctaccttaagtttgatttttcactccagtcccagaattatctatttgtccaagtagtgttgcttccttctattgaagaatagtacttaggaaccataatatgagagctaggtattcttattaatactggggtgttactgcttctgaaagctctcagcagacagagtttggaaatgtacatattaatatacactcacatataaaaacatctcttcctttctctttctctgtgtctccctctctctgaatgaataaattatgagacctgcatttatccaaatattcctggctagggatggtggctcatgcctgtaaacccaggatgtttagctcagaatgattcatcctgaccctcacagcagaccagtcaggtggaaaagggtacagggaattatggtccttattacttgttttttgttttgttttgttttgttttgtttttgagacagagtctcactctgttactcaggctggagtgcaatggcgcaatctcatctcaccacaacctccgctgcccaggtgcaagcgattctcctgcctcagcctcctgagtagctgggactataggagcacaccaccacgtctggctaatttttatatttttagtacagatggggttttgccgtgttggccaggctggtctcaaattcctgacttcaggtgatccacccatctcggcctcccaaactgctaggattacaggcatgatccaccatacccggccagtctttattacttttattgtctgattgtttattgctagtttagtttaaaaagttgacttttgtttattgaagctgtatgtaatgaacttggtaaattcacttgcaaattcttacagatttgctacacaagataatcattatgtgcaaatgaccgttttattttttcctattaaattttttttttccttaccttattgcactggctaggatctccaatgaaatataatagaatcaataatagcaggcatccttgtctttttcctgatctaggaggggaaacttttagtagtttaccattgagaatcataataactggccaggcacagtggctcatggctgtaatcccagcaatttgggagtccgaggtggatggatcacttgaggccaggagtttgagaccagcgtggccaacatggtgaaaccccatctccactaaaaatacaaaaattagtaatgcacgcctgtaatcccaactactttggagtctgaagcaggagaatcacttaaacctgggaggtggaggttgctgtgagccggggtcacgctgctgcactccagcctgggcaacagagcaagactctgccaaaaaaaaaaaaaaaaaaaaaaaaaaaaagaattctgatgcttactatagattgttgaaaagtaggtaccttttattaaattaggtaagttttctttcattctagattgctgctttttagaaaattatgaattggtgttcaattttttctttttttgagatggagtcctgttctgtcgcccaggctggagttcagtggtgcaatctcggcttactgcagcctctgcctcccgggttgttctcctgcctcagcctcccaagtagctgggattacaggtgctgccaccacgcccagctaattttttttttgtatttttagtagggatggagtttcaccatgttggctaggctggtcttgaactcctgaccttgtgatctggctgcctcagcctcccaaagtgctaggattacaggtgtaagccaccgcgccaggccagtgttcaattttttttttttttttttttttagatggagtttcgctcttgttacccaggctggagtgcaatggcatgatatcagctcaccgcaacctccgcctcccaagtttaagggattctcctgcctcagcctcccatggtgttcaatttttaaaaatgcttttcctacatctgttaagataatcttgtagatttttctacttattctgttaatgaaataatttcatgagcggttctcaaccgagggtaatttttctccctagagagcatttggcaatgtctggagacatttgtgattggctcaattgggtgtgtgtctgtgctactggcatctagtgggtagaagccaggggtggtgacaaacattctacaatgcacagaatgtctccccacaacaaagaatattcaactaaaattgttaatagtattgaggtgtggaaatcctaattcacattgcttaatctttgagtgttaaacggaacttcatgagagagacgggcctataatttttctttcatgtaatgtccttgtagttttgtcattaaggattcttttggtctcataaaatgaattagaacatgttctctctttttcaattttctggaagaatttgtgtaagatagatgcactctttgccttcctttacaatcagacctgcctctggtcaccttttcaactccagaagtcatttatgtcctttgaccctaagatatttgctgaaccaaacgggattagtatttcttaaagatcagaactcacctgagcctactggattctagcaggaatggagacaggtagaaagactcactttagcctcaggcttaaatatgtttttatttatttatttatttattttaatttttgagacagagtctcgctctgtcgcccaggctggagtgcagtgccgtgatctcggctcactgaaacacccacctccccggttcaagcctcagcctcccgagtggctgggactacaggcatgtgccaccatgcccagctaattttttgtatttttagtagagatggggtttcactctgttagccaggatggtctcgatctcctgaccttgtgatctgactgtctcagccttccaaagcactgggattacaagcatgagccaccgcatccagcagtatgtttttattttttattttcttgagaaagagtcccactctgtcacccaggctggagtgcagtggtgtaattttggctcactgtaacctccacctcttggattcaagtgattctcctgcctcagcctcccaagtagctaagattacaggtgtgtgccagcacactccactaatttttatatttttagtagagatggtgctttgccattttggccaggctggtcttgaacttctgacctcaggtgatccacccacctcggcctcccaaagtgctgggattacaggcatgagccaccgcgctcgaccaggcctaagttttatactctacctcagacttttatcattttggcagttattggacactaagtcaaatactaacaaagtgagccagtgattcgcatttagctattgttccttgtctatagcaccttgggtaggaaccctatgggaagatcaaggcaggataaagccttccttgggatgctggccataacactatcacagcagcgatgaaatcttaccttctaccactcccatccactgtgtcttctgttgttaactaaacattcagctcctttcttggggtggaatgccttttagtttattctacaccttgactgtcacagggggtcagtaataggggagaacacaagtttctggttagataaatctgggtcgaattctacttttgccactattagtagagttacccctaacaaaacatttagcttttccagtgaagcctctgtttactcatctgtggagtgggacttataatgtctacttgtgtgggttaagaagacaagaattcattaacctatttcccacttgccctgagaacactcatgtttctaatcctaatgtgacatcatatacatttctgttacattaggactagagacaagttttgtttagaaataacttcacaaacagtttttatattttattttcaagataaaaatcattcagatttgcttcagcttcaaggaggatgtttatgtaaaattaaatgagcactggcaaccagctgcaccttttcttctaaacgggaaatgggttaagtggtttagatggctctcagcctcaaagggctgaagacagaaactctaggctcaatttccagaaatggctctcaacaccacatagagctggtccatcagaggagctcctgcttcatccaaaggcaggaagcactaaatcagaagattgccttagagttaggaagtcaatgctggactcaagcccacaaaatgtcctcgtcctgcctatctctttgctcgattcaaaatcccattcatgtggagctaattggagaaatcaaaatcacatttttttttttttgagataaaacagacaaaaatttctgctcttgagaaatgtatattttaagatgagacttgttaaaagagacctctgtcttattttgtatgtatgtagagccatggaagtctagagctttgatgtatgatgaatatgtgtttcaatcttctctgttctataatcttgggcagctattttaacttctttgagcctcagctttctcaatcctaaagtgaagatacaaattcctatcttatcctcaatcagttaaatgtagaattaactatatgatcctgcaagttcatccttaggttacatacccagggaaaatgaaagcatacatccacacaaaaacttgtatgtgagtgttcatagctgcagtattcataatggccaaaagtagaaacaagtcaaatgtctgtcaattaatgaataattaagcaaaatgtggtatatccatacaatggaatattattcagcaataaaaaggaatgaagtaccaacacatgttaagacatggatgtacctttcacgtagcatattatgtgaaagccagacacaaaaggtcacattttctatgttttcatttatataaaatgtttagaatgtgcaaatccacactcagaagttagattagtgattgcctaggactggaagccagggagtaattagggtgtcatggttaaggggcgtagaatttcttctgagggtaataaaactgttctaagatagattcgattttagtagtgatagatgaacaactctgtgaatttactgaaagccattaaattgtacactttaaatgagtgatttttctagtatgcaaattatatttcaaaaaagttgtaagaagaaaaagttctaccatgtagggttctttgaagattaaataagctaggaatacaatatacctagtgtacctagtatacatagtgcctggcatttggtaggtgttcaaaatatgctaacatttattctgttggtaatccttaacaggctggtttatacaaaagcttacaattatgttcattgttaacataatactgatgtatcctttcgtaatcaatgtgtgccttgagcagatagcccttctttaccctcagttccagccctttctttgcttcttgaaattttacgtgtatcacaacccagctcagatgtcaccttttcaaagcctccttgttggttcagctaaaaatcctgggctttctgtatagcatccccaacaaggggcattcagaggcaagctctggtcaccatctggcttgtttccaaattatttgtgaatgcaccacctgtccctgtgtcctgccctctgtttctggcatggtggcacctggcacagagggagtgatcctgtaaggaatgtgttcacagcacatgtgctctgagtcccttggcacagcacctatggtgggcagaattctgagatgattctcctgacctctgccccctggtgttaatgctataattatgtgacatggcaagagaaattttgtggatgtcattaaagttagtaatcagcagaccttatgctagggagatgggtgggcctaacctaatcacagaagccctttgaaagcagagtcttctttggctagaaaaggccatcagaggttcatagtgggagacagatttgacttgaggctggttttcagttactgagttggaggggtccctgagacagaactgagaacagtctctaggagcagagagcagcaccttggctggcagctataaagaaggacctgggtccgggcgcagtggcccatgcctgtaatcccagcacttgggaggccaaggcaggtggatcacctgaggtcaggagtttgagactagcctggccaacatggtgaaaccccgtctctactaaaaatacaaaaattagccaggcatggtggcaggtgcctgtaatcccagctactcgggagactgaggtagaaaaatcgcttgaacctggaggtggaggttgcagtgagctgagattgggccactgcactccaacctgggcaagagagcaagactccatcgcaaaaaaaacaaaaaaaagaaagacctggttactacaattgcaaggacctgaattctgccaatgacctgaatgagcttggaagtggattctccccaagagccttcagagaagggcccagcccagccaacaccttgactttggccttgtgggaccctaagcagggagcccggttaaacccacctggacttctgacttatagaactatgaggaagtcaatagggattattataaactgctacatttgtcatagtttgttgtgctacagtagaatacaaatatatccctcatctctggagagcagttttattcctattttacaagtgaggagacccagaggggtgaagtcacttgcccaagattgcactgcacatgaatgacagggctgagctacagcctagggcaggagtcaacaaatattttcttttctttttttttttttttgagatgaagtctcgctcttgtcccccaggctgcaatgcaatggtgcaatctcggctcactgcaacctccacctcccaggttcaatagattctcctgcctgagcctcccgagtagctgggattacaggtgaccgccaccatgcctggctaatttttgtatttttagtagagactgggtttcaccatgttggccaggctggtctcgaactcctgacctcaggtgatccgcccgtctcagcctcccaaagtgctgggattacaggtgtgagccaccgcacccggcccaaacattttctataaagttaaatatcttaggctttgtaggcctaaaatatttacaatttggatctttacagaaaatgtttgctgactcttttaggatcttgaatctgagaatcttgtttctattggtgttaaggatgtgctcaggtatctttctataaagatactcctgctacagagcttgctgggccttggctgctcaatgcaggccttgagacatccctgtggaaatgtatcatgttcctaggcagggaacagagcaacccaccatcacatcgcccatgctggccatgacatggtggcctactgtgtgctgtttggagatggtatgggggtggggacaggacatgacatgtgcttacctgccctccagatgctgtacacaggggagccagatatataagcaaataattagcatgcatgggctatggaaaggtgctcacgatggatcacgttcaataaaaaactatatgcaatgcatgcccagagttttgtaaaatacacgttaggaaaaagttatatcaaaaatgtcacagtgatgggtggtctctgcgtggtaatgagtcttaagtcactggaaaagaacattggacccctgtcctggaggagggagaaaggaggttcttccaagaagatcgtggattctcccattgcttctctcctacttacagatttaaaaaaaaatagctaatatcactaagcacttactataagccaagcactgtcgccaagcatattatataataactcatttaaccctcatgccatctctaccagacctatctgattccagtgcttagtacttgtttctccaagtgtggctgcatttaggggaatgtttttccttctttgtagggttcgaaactgttctttatctgttaagggagatattctgatttcttttaactgactgatattttctaatttttctgcagtttccagcgttttttttttttgaaatggagtctcactctgttgcccaggctggagtgcagtgggaccatctcagcttactgcaacctctgcctcgcgggttgaagcaattctcctgcctcagcctcctgagtagctgggactacaggtgcatgccaccaagcccagctaatttttgtatttttagtagagatgaggtttcaccatgttggccaggatggtctcgatttcctgacctcgtgatccacctgcctcgggttcctaaagtgctgggattacaggcctgagccactgtgcccggcctagctatcttttttccactggaaaaaagaaggaaggcttgcaggtttatttttgtcagcatgtcgagggatatgatgtatggacctggaaagtcctgtgaaagcctagaagagagactggttcataccactttaggaaactgaagagaagtcacccacagaaggtgacctgaattttaaaggaagtgcatgagttcaccagatgaaagaacttttgtagccaaggtgtgacattagacccgggacacaataaacagtgaatttaggtgcaggaagtgagactaggaggtggccagggacctcatcacaaggttgtggatgcttaggaactgggattattccgagggcaatgaggagccactgaaaggcacagccagggctgggcgcggtggctcatgcctgtaatcccagcaatttgggaggctgaaatgggcggatctcctgagatcaggagtttgagaccagcctggccaacatggcgaaaacctgtctctactaaaaatacaaaaaaattagccaggcatggtggtggtggcctgtaataccagctactcgggaggctgaggcaagagaactgcttgaaccctggagtcggaggttgcagtgggcccagactgtgccattgcactccactctggtcaacagagtgggtctccatctcgaaaaaaaaaaaaaaggcacagccaggtgagggactggttgggtgctgttttggtagctcaagctggtgcttcatgaagggcaggcagcctggggacagagaggccagtgagaggcaggagcagcagcccaggctgtcactgaggagggaacaatgtggcaaaaatggagaagtgcataggagtctggaaggtccagacagatgtgggaaccccacctcctctccccactccccactcacttattagctgtgaaacccaagcaaggcactgccctctgagcctttatgacttagccacttttcactaaatgtgaaaagtgcctgactggtgaccagtaataagtaggtgaagtggtagctcctttccctgccctgttgaggcggaagctggtgaccaagggttccctctgagtgacccagctggtggcagggaaaatctgaggctgcttgttcagagagggttaccactatgcccgggcagcacggcagacttgctgctgggaccagttctggaggtcagagacctggagggcttggtgtctgacggctgaacaaacaagctggttgaggcgaggttgccgtgagccgagatcgcgccattcaccccagcctgggcaacaagagcgaaactccgtctcaaaaaaaaaaaaaaatgccggttttgtcaaagcagcaggtggcaaacactgagtcaaaagactttcccggccgggcacagtggctcacgcctgtaatcccagcactttgagaggccgaggcgggcggatcacaaggtcaagagattgagaccatcctggccaacatggtgaaaccccgtctctattaaaagtataaaaattagctgggcatggtggcgggcgcctgtagtcccagctacttgggaggctgaggcaggagaatcgcttgaacccgggaggcggaggttgtagtgagccgagatcacgccattacactccagcctgggcgacagagcgagactccgtctcaaaaaaaaaaaaaaaaaaaaaaaaaagactttcccctctttgggcctcagtttccctttctgtaaaatgcaggtgaagaggcatgagctcaggattcctaaagccctacggggctgagcaaggacggtgctttgcgtttgcctcccttcccccagcccgcccgagagggtttgctggggcagggtggcccctgggacgggttccagacagttctaggcgctcaggtccgcagctgtgctacccccgccgcccgggacgcccggtccccgccagggccctctcactgtagctttaaggagggctggggccgggtgcagcggcacctggagtctcggtggaacccggcagcggtgggcgcggaccccggagaggctgccccgagcccgagcaccccctgaccgggcgctcaccacgggtgttgggacaagcagcggagcctgcgggctggagccaggctcggaccctccgcgccggggcgggcggccgagcggacgcagctggcagtggcggcgggagagcgccccggatccgcccggagcccaaccccgtggcacttcggctggctgggcagcggcgctggggacaacgcggggccttctgcaacgagcgcctgcgtgggactccaggggccggcgccccgctccgctccccccaggcctcaaccccgctggctacccgcgctgaaacctcacctgccgccggctgcaaacggactgcgctccaggtgggtggaaacgtccttctcctactttctgggctcactcggctccctgtgacgcgatcccgcttgcacccttgcccttcacgttgaccgcagtggctggtgggcagtgggggacaccctgggctccgcctgggttttctcttgctggtgacttgggccctggcgctcagtgtccctggtcgttagacaagggtgccttgagccacttgttgttcaggcggtttcttctttacagaaagtggccccccacacgcccttcctggtggcaggagcagggcagtgggcagcgtttctgccctgctccatggggctggggttggaggcggctctcccattcctgctgtccggacaggagcggggcctttctatccgcagacttttgctgaagacactgtcccccgcccccgcccctacgccagcggcagagaagagatccaggctggccccgctcctggttggtgggcagggcaagctggaggggggggcaggtactaagtgttgctgtggaaataaaaatcattgtaacaggagaataaatggttttcgtatattttaattctatcaaaaggatattcttctgcccatttgacagaggaaggcaccacgtggagaagcttcataacatgagggccagggcccatcctctgtccatccctgggtaacctgcttcccttacagctcgctgtctcacgctctcatcttcataacctgcatcccctggagcagagattcgagctcagaggtgttgagcagcctctgcaaggtcccagagttcagaggaggaaggaccaccatagtgacagggagtgacaggtggagccatctggtcagggagcaccctcccctggctggagggaggtggggacagccgcagacaggcttcagggaaggggtgaaatgagggccctggatgggagcagagggttccctggaatggggcacaggcctagtagaggcttccaggtgataggagtttggggggagggcatttgagggaggcagggccaccctccgaggccctgcatgagtgctagggttgggggtgggacttctcagggacaggggagttcctggcttgccctggggtgggcttatgcattccagggcaggtaactcttcttttcctagcagggtacaggttctggaggtacacagtgtaagggaccagtaacctgcttcaccaattctctgatatggctcaaggaaattcttggggtgggacaccctgctgacagttactgcaaaaatagtcacggcaaaacaaaacaggctgtccttcatccagtagacactgaccctctccacgtgcccctaatcccccagatggcaggttagcacgtgccctgcctgccatgggggagccacatggaaggagggagacccacatagaaggagatgaccatgatgccacgtgagaccatgcaaaggacaattgcaggggctggtccaaggtgtgggagaggttaagccagtaaggcaggcagtgcattccagagtgagagctgcctatgccaaagacttaacacctgcacccattcacagcatggcctcaactttatgtattaaaagatagtggctgggcgtggtagctcacgcctataattccagcactttcagaggccaggttgggcagatcatgaggtcaagagatcgagaccattctggacaacatggtgtgttgggagcaagccccccaaagtctggccataaactggtccccaaactggccataaacaaaatctctgcagcactataacatgtccataatagccctaacgcccaagctggaaggttgtaggtttacaggaatgagggcaaggaacacctggcccgcccagggtggaaaaccacttaaaggcattcttaagccacaaacaaaagcctgagagatctgtgtcttaagggcatgttcctgctgcagttaactagcccaacctattcaattaatttggcccatcccttcgtttcacataagggatacttttagttaatttaacatctatagaaacaatgctaatgactgatttgctgttaataaatatgtgggtaaatctctgttcagagctctaagctctgaaggctgtgagacccctgatttcccacttcacacctctgtatttctgtgtgtgtctttaattcctctagcgccgctacgttaaggtctcccgaccgagctggtctcggcaatggtgaaacctcgtctctactaaaaatacaaaaaattagctgggtgtggtggcacgtgcctgtagtcccagccacatgggaggctgaggcaggagaatcgcttgaacacgggaggcggaggttacagtgagctgagatcacaccactgcactccagcctggcgacagagcgagactccatcttaaaaaaaaatagtgataagctgggcacggtggtttatgcctgtgatcccagcactttgggaggccgaggtgggtcgatcacttgaagtcaggagtttgagaccagcctgaccaacatggtgaaaccctgtctgtactaataatacaaaattagctggacgtggtggtgcatgtctgtaatcccagctactcgggaggctgaggcaggagaattgcttgaacccgggaggtggaggttgcagtaagccaagatcacgccattgcactccagcctgggtggcaagagcgaaactccgtctcaacaacaaaaacaacaacaaaaatagtgataaacttggctgtgcacacaggcagggatttgattcagactagagctgggtccaaatccagcagcaaccttggacaaggggtcaccctaggagtcccagtgttcttgggacataacactattgtgaggaataagtgaagagatgtctgtaaagtgcttagcatggtgcccggcctctaagtgcccagcacacacctggtgccaccatcgtcctgtgtggtgtggagagaaagggagaaatgcacagggcaagggagaaatggacaagatactttatatggagattatgctcatctgtgagaagcaagatttgtggggatttgtatttttcattctcattttcctgtggctttctctttttcccacaatgagcagcagctattgtatcgatagaaagtaaaatgtgttgtaagttgccttgtgcaggtgtgcccagatgcgagctcctctagtgctgataaccctgctgtacccggctacaggcaagattcttcaccatttggggttcagtctcctcatctgtaacatgggaattttctccagcccagccaccttcccccaaagtgttttttcctcttttttttttttttttttttttttttgagacagagtctccctctgtcaactggactggagtgcagtggcacaatcttggctcactgcaaactccacctcccaggtttcaacaatgctcctgcctcagcctccagagtagctgggattagaggtgcgtgccaccacacccggctaatttttgtatttttggtagagatggggtttcaccatgttggccaggctggtctcgagctcctgacctcaagtgatccactggcctcggcctcccaaagtgctgggattacaggcgtgcgccactgcgcctggccaagtgttttctcctcctaacagcctttcctggctgtcaactttgaggagtggcaggtagtcaggttctttttctctctccatgaaaatgctttgatctggagacaggaagtacttgcccccaggacagattcacaggaggcgaactgcagggaatttacaaatggcattgtatgtgtccagtagtctaagggttcaaagatactggggtccattcccagagcactccttttacatgtatacattctctctctctctctctctctctctcacacacacagacacacacacatgcacacacacacatttgtaaacatatttgaaactatacccctttgaaatctaaagtttcacctcctatatcttaaaaatgtaccatgcctttcacctcccacaggaatatgactttgcaccactgtgtattgtcgtttggctgggcaagccccattttgaagggattgctggttcctgacatcttccttagggtttatgctcctttgcttcctgctgcaccaactcagcctctggaagagcagacagctggtgtatctgcaaatcctcctctcagcctgccagagtgcctgccctttaagtgatagcaggcccaggcagttgagtggttttccccaggacaagctgcagagcgagaaccaaatccaggactgcactccctcaacagtgctgtggcagctggaatcctgcattcttgcccctttctcagctctttgcaatggtgggggaggattttcacccaatgagtatctgctcatccagcagcactttccctcatttcagaagatttactcaatgaacatttattgagcagctattatgtgctaggcactggggggatatagtggtgaacaaagccagaatggatccagccctctgggagctcacagtctgggatagtggacaggtgtagcagaagttaggacaggtgcatgctgtggtgaggacagcccagaggacttgggtgttaaagtgaaaagtgtcagcagagaaggcgtctcagatgaggctgagctggcccttgaagagagataatgggataacctggacctaggtttcagcctcttagcatggtctggggccaggtttttacccaggtttatccccccatccatggttttctttacttaatttagataacactctatatatttcttggtatacttaagttgaaaaaaagtaacatatcgtaactgttttctcctgttattaaacctttttgctgagcttgattttttaaaaactattaatattagttacttcatctagaagttatgtcatattttacttaccatttctttataattggacacttgagcatttttcaaatgataacccttataaacaagggcatggtgaacatctttttgcacaaagttttgctccatgttgttagtttcagtttcagacatttgaatgctctgtttcaatgttctgtttgccctaggtcccagtgtcttctttgtccagtggagttaacagcgtggatctcatgggattgtgaccacgtgaagtaaggcagagcatagccagcaaaccctgattctggcaggcctggtccacccaacaagtattcattctcctccctctcagcttcccataaggcatcagggtgggcaatcattattattattattgtttgagacaaagtcttgctcttgtcccccaggctggtgtgcgatggcgtgatctcagctcactgcaaccttcgcctcctgggttcaagcgattctcctgcctcagtctcctgagtagctgggattacaggcatgtgctagcacgcccggctaatttttgtatttttagtagagatggggtttcaccatgttggccaggctgatctcgaactcctgacctccggtgatcctcccaccttggcctcccaaagcgctgggattacaggtgtgagccaccacacccggccgtgggtggggaatcttaatatgcagcagtagatgaggctcctgaggactggggagaggcctagagtgtcacacttagttcctaccatgtcccaggcgcagtgctgatacccattatctctgaccttcaaaatagtgctgcaaagtccgggacaccatctccattttgcagatgaagaaactgaggcacagaggtgtcaaatgacctctccaaggttgtaaagtgacctagggtagagaaatactaacacctaggtctccagtacctttcatgtgacccatttcgtcttctctctcctgtgtccagatgtgtgatgggggcctctactattgcatgatggtcagcaccatggtggttcttgtggctgggacactgcttgacttggtggagccaaggggatgcacgtgcccagcctggccagctgtcccacccacagaacaccctgtgcctggggaccccagccccggctccagtgggtcagttccttctgttgtggcacaggtggcctgctgctgctcctcagtctgctgtggtctggcagggccagcacccaggggtcacctgatgggacccacgccacctttccagaggcctgcaccacctcacagtggaatcctcagaggagagctgcaagtcactggggcagggtgggccagtggttggggaccacaggtgggggcttagtcacaccattcagcatttgcttagtaaactctcatggggttccttatctgggccagcccttgccctgtactctggggacattctagaagccaaacagtgcagtcctgagggaatttaaagcaccatgacaaagggagacaatgacaaactagaaaagttggagctgttagagataggcagacatgatcttatggtgacacggagaaacccaggaaggctttctagaggaggggggcagctgagctcagcatgcagtttgtattgcgagcattatatgtaaacatccagccacagttggaatgctgactaatttcttaacccagcttatagccagtagaagactctcctatctggacccagacagttgaagagatgttggttctcatacctgggttcagggccataggtatgatcatgggttaataccaacatagggactcagagagaattgtgactctcatgcataccagttaaagcctcaggccagtaagcgtcctaacagggcctagtacacagatgagactgtaacactcatatgcacccccatcccacaataaagattgtcatccacacacatgaacacaactcactgttgaggttctgaatctcacagctggagacagttgaaagtttgaacattgactcttgtaagtggatccggtccaccagtgggttggcgactctcagaccaagattcaacacaccgtgaggcttttactccactgaggagacactgtctacaggaagaattgaggctctcagtatagattgtccaccattgtgtctcatgtacttagacccaaaatacaggtgttgactttcatacctaaaacaaggacatgttcagtattgttaatctcatccctgggccttcctgcaggagtgattttaacatctgcctctgctcaacacttgggtgattttattctccttccttagctcagcccacggatgggattgtgacatatctcttggccaccatccagctgatgtgactcttctctttttgctaggttctgctcaagaagagattctgacatattgttggaccaaacaccaaggttatgtcacttttgtgccttggccctgacctcagaaggcattgcgacatactgttgggttaatcaccaaggtgatgtgggacttctgcctggaccctgcccacactgggcattgtgacatttagggcccatcaactatctggcatggccctcctctcttatctgaccgttgcctataggagagattgtaacacatctctggatttagaatgtagatgatgtgactcttctctcctgactgggccatggccagagaagggagagtgacttaccactggatccagcacacaggttatatgattcttctttgtgatctctgcacaaaggggtcattgtgagatatctcagggtttatcacctagatgatgtgatgctccttttcttcctggaacctgtctacagtgggcattgtgacatatcacttggcccagcacctacatgttgtgactctgatctcatgcctgggccctgcccactggggtgattgtgacatataagctgggcacagccatgaggttatatgacactcctctttttttgagttctactcacagggggcattgtgacatacctctgggctccttacctaggtgatgtgactctttccagggtcctcctgtcagtgggtattgtgcccaagatgtaattgtgatgcatcactggtcctagcacctaactgatgtgactctcctctccttccaaagccctgcatttattgtttattgtgacatattttcaaaacctaggttaggcaactcttttgcatgcgtcctgctaatagggctattatgacatatttttttttcacctaggtgatgtgactctccctttctgcctaaacactgtaaaaaggggagatcgtgacatatcactggacccagcatctaggtgatatggctctcctttttcaccttggcttcttgtattttgggtattatgacatatcactgggtcaaaccaaaggagggggaggctcttgcctaggccctgcccacaggagaccttgagacagatctctgcatccatcactttggaagtgtgactctcctcttctggctgctccatgcccgcacagaagactgtgatatatctccgggttcaccaaccaggtggtgtgtctcccatacctgggcttttcttgcagagataattgtgacaaatcgttgtgcacagcacccaagtcacgtgactctcctctcatatcaaggctctgccaactagggtaattgtgacatacagctgggcctagcccctaggttctatgactcttttgatgattctgagccctatctacagaggtcattgggaaatatctcttggcccatctactaggtaatggaactcacctgcctgggctctttttttaggaggtattgtgacatagggctggatccagacctaggtaatgtgactctcctctactgcttgggctttactcaaggaggaattgtgatgggtcactgaacccagcacctgggttatgtgttatgtgactttcctcttctgcctgggccctgcatcaattgtgttttttttttttttttttttgagatagtctcattctgttgcccaggctggagtgctgtggtgccatctcagctcactgtagcctccactgcccaggttcaagtgattctcctgactcagcctcccgagtagctaggattacaggcgtgagccaccacacccaactaatttttgtatttttagtagaaacggggttttaccatgttggccaggctggtctcaaactcctgacctcgagtgatccacttaccccagcctcccaaagtgctgggattacaggcatgagccactgcacctggccccctgcataaattatacattgtgacttcactgggtactaacacctagttgttctgactcctcagcatgggccccgcctacgggtgtattatgacatatctttttgttcctcacctaggtgacgtgactcttttttgtgtcttgaccctgcctaaaggggtgattgtgacatatcgccgaactcagcacctaagtgatgtgactctcctgttttgcctgggccctgcacatatttggcactgtgacaaatctctggaacaaatacccagggcatgagaggctcctgcctgggacctgcccaaaaggggccttttggcatatctctgcatcaattaactagcagatataactcttcttttctgcctaggttctgccaaaacaagtgattgcaacatataattggaccagcaactagatgatgtgactcttctcttctgcctgagccctggatatactgtgtattatgacacatggctgagtccaacatcaaggtaatgtgactctcctcaatgggttctgcccacagaggtattatgacatatctttatatttattatctaggttatgtgactcttttcatgtgcctgggccctgctgaagtagggattctgacataccactgaacctagcacctggatgatgtgactctcttttattgcctggttcctgcatattttgattattttcacatgtcactggctccagcacctaaataatgggagatagttgcttgtgccctgcatacagggggcattgtgatatgtgtctggacccatcaactatttgatgtgactctcctcttctacctgggctttgcaaataggaaagattgtgacatatctctgggacatatcttggtaatgtgagtctcctctcctgcctgggccatgcccacaaaagggagagtgacttctcactgggccaaggacaatgttgatgtgattcttctgcctggttcctgcacacaagagccattatgacctatctctgggcccatcatttagatgatgtgaccatctttttcctcctgatttctattcacagggggcatagtgcaagggtattgtgacatattgctggaccaagcacctaggcgatgtgactcctctctaatgcttggcttctgaccaaggaaaaattgtgatatatcactgtttccagcacctacgggatttgactctcctgaatgggccctgaatttattgtgtattgtgacatatggcttggtttgacacctacgtgatgtgactctcattcatatgcccactggggtattattacatatcttttctttatcacctaggtgatgtgactgaccacttctgcctgggccatgccgaaaaaaggagattgtgacatatcactgcattcaatacctagatgatgtaagttttttcttttgcgtggctctgcatatttttcatattgtgacatatcattggacccagcacctaggtgacgatactctattctcctgccttagcactggagaatagagtatcactggacgcagcacctagaagatgggactgtattctactgccttggcgcagcatacagagggtgttttcacatatcactgggccctgcacacaggttatgtggctctcctgtgacatattgctgggtccaacaagctggtgacacaaccctcctgctggggccctgcctccctggcattgtgacatacctctgtgcccatcaccgtggtgatgtgattctcttctcctgcctggtccctgatcacagaggggatggtgatatatcgctgaacccaacccctggctgacgtgacttttcttactaggctctgctcacagaggagattgtgtctttttgcttggcccaacgactaggtaatgttatttgttttgccttggccctgccctcagaaggcattgtgacatatttctgggcccagcataaaggttatgtgaatctcctgcttggaccctgctgacagggggaattgtgacatatctctggaatttgtcacatacaatttatcctaaattcccctgaaaattggaggtcatctctggttgctaattggctatattcaaaggaaaaataaacttatgctttcatgagaggtagtttggaaacttggagccaggtgcgtgatgaaagttggctcctatcttccaacaaaaagtgtggaatggagctctattttctttgctatttacattttaaataaatgattttcaggtcctagagaaagacagtcctgagtcagagatactcacaaaagacctatttagcagttagaataatttatatatatttcaagttggcagaaaaataatttaagtataaaagttttctgggctgggcgtggtgactcacacctgtaatcccagcattttgggaggccaaggcaggtggatcatgaggtcaggcattcaagaccagcctggccaagatggtgaaacgccatctctactaaaaactacaaaacttagccgggcgcagtgacaggtgcctgtaatcccagctactcaggaggctgaggcaggagaaccacttgaacctggatggcagaagttgcagtgagccaagatcacaccactgcactctagcctgggtgacagagtgagactccatctctaaaaaaaaaaaaagttttctaaagtgaatgtgtttaaaaaaagagaagagaaaaatctcttttttcatggacatctgaattctagtaggtgctggattcaggcacctgaggggtgaccttgggcatactgtgcacatcagaagggtttatggggaagtaaaagcagaagaggttgggcgcagtggctcatgcctgtaatcccagcactttgggaggccaaggtgggtgggtcacctgaggtcaggagttcaagaccaccctgacccacatggcgaaaccccgtatcttctaaaaatacacacaaaaaaatagctgggcatggtggtgggcacctgtaatcgcagccatttgggaggctgaggcaagagaattgcttgaacccaggagttggaggttgcagtgagccaagatcccaccactgcattccagcctgggcgatagagtgggactctgtctcaaaaaaaaaaaaaaaaaaaaagaaaggcaatagagggaaaggtgttatcaagaacccatgagtgggggacagtacataatagctgggagaactggtttatgctacagacactaacccaggcagggctatattctgacatgttcctgtgtccatacaggcagatgagattatgactggtggtccacaggtctaggtggatggagggaaaggttgctgctgctgtttgaggatcaagggtaggaaagagccaggagtcctctaggaacttgtgtgaattttttggtgagcaattctaggtgcaaaggccctataaacataattcctgatagtcaagtcttgttttgtggagggtgtggccacatctattcctagtgggtatgttcataagtaggtgagaatcgtgtggtagcaggttgggggcagggggtctgttctcagaactcctttcttctaagtcctcagtccccttttaccctgagaggagatctggaatcacaggacaatgtgcattgtgacagactgtgtgcaggggaacagagtttccctcctgcctaaacccctgggatattttttcctgacaccaaatgtatagagttttaacagcaaccaattctccaacaccaattggttgtccaataataactcaattctgataccatcctgagtcaacgcagacgccaaaagttcagggctcagtcccacaacactgcccccactgcagatcccagctgcgattattaggggcccatctatccttctgagctactgcctataaattgggggctcccataacctgctcctcaagtttaataacttaatataactactcacagaactcaacaaaacactatacatgcatttaccagtttattataaagatacaagtcaggaacagccaaatggaagaaatgtaaatggcaagaaaaagcggtgggggggaatggggtgggtaggtaacagcaacagctgtgattaaagaaatcccccatcctttgtgttttccaagagcatttactgcaaagaaacatctttcctgtttttgatatcacaaagccacagactctaaattcccttttttgggggtctcataaacaattaaataataagtttgtcttcagtggtcagaacaaaatacttgttaaccaaactttgtctaagtttctttccttcctcaggctcccaaactttgacctgaacttactctgagctgacacacaactcctctttatacccctcttaagaacaggctagccaggtgtagtggctcatgcctgtaatcccagcactatgggaggccaaggtgggcggatcacctgaggttaggagttcgaggccagcctgaacagcatggagaaatctcatctctactaaaaatacaaaattagccaggcatggtggtgcatgcctgtaatcccagctactgaggaggctgaggcaggagaattgctggagcccgggaggcagaggtttcagtgagctgagatcacaccattgcactccagcctgggaaacaagagcaaaactcggtctttaaaaaaacaacaacaacaaaaaatacaacaggctaacttctgggtgaaacattctctgatctgggacctgatttcaccatgttttattcctccctccccctcctacctttctttctgtcctgtttcctcctccttatgaaagaaagccctattctgcctaacttttgagatcttccagcatcttatagttggtgctttccctttgttgcaatactcctttaaaatcatgtaacttcttacctaaatctgaatttgtcttattttacaaaatctagaaatagccccaggaaaataacgactccatcctcagaaagagcttcccaaccccactttcatgccaatcccaactgtgtctgcctaaggatttccagcttttcagggttttgtcatttctctaagtataaaaggctctgtccatggctattgtgagcaggctagggcatctgcaggggaggctcctcaggcagaactggttgctccttcaataatctccctttgcaggcaaaactattgttagcttggggagtcactgaattcaggcttctacttcccagtcagggttattcacttagttttaaataagaaaatgctcaatgtttgaagaaaagagcaaaatcactcaaacacagtgtttatagaatattgtaaggaaattgtaaggcacttagtatctatttctttcagaaaataaacgtgtcatttaaatatttccatgataaataatttaataaataaccatatgggaacatttctagaaggtgctaagtctcatctcataaaatttagcattaaacttggacatccagaccacaggatacagaacacagatgtccactgttacaaattctagaccctgcaaaaaatgggagctgatgttttgaaaaatatatgcaattcaccagttaatctatcacatttgctgtggaaatatatcactttctgtagccataatgcaagagcgatttttcctatttatttccctggtagctttggtttttttttttttgttttttttttgttttttttgtttttttttgagacagagtttcactcttgttgcccaggctggagtgcaatagcttgatctcagctcaccgcaacctccgcctcccaggttcaagcaattctcctgcttcagcctcccgagtagcagggattacaggcatgggccaccatggccagcgaagtttgtatttttagtagagatgaggtttctccgtgttgatcaggctgatctcgaactcccaacctcaggtgatctgcctgcctcagcctcccaaagtgcaaggattataggtgtgagccaccgcactcagccttctggtagcattttcaaagaaaagccctggaattttacttgaaatcaccccccaaaaagaacacacataagaaacttactacactcactctggggataataaagatagataagaatctttaatgaaataaatatatgactagattttactgaaatccacctttctgggtacttgactcttgtaaaatgtcttaagttctactaataaaatgtaatttaaggtaattaaaaaactgaagttgaaataagtaaaataatctttccaaggtgacaaactcagggagtggcagtgccgattggaacacaaacatgtctgactcaactgtcaagtcagaccatggtatcactcaaaacattctcccattcccatcctacccattcaattactcagtgatcaccttcccaggagaaactgtactgtactccactgtgggcctcaggtacattttgttttgcaggttcttgcattgccttactaaaatgggttcttcttagtcctttggaaaaaaatttatttcttcacaaatctgatgaatccaaagggcaggaattatttctgccttttctcctcaatatgaacctctgattggctgatcaccaatgtgtctacaaagaataaaaattggggtttaaaaaaaccctttttttaactgcttgcacacttgtgcatttttatttcattggaggaaaatcctaaatacattgcagagtcaaggggtaaattaaaaaaataataatttcatttatttattttgagatggagtctcactctatcacccaggttggagtgcagtggcgcaatctcggctcactgcaacctccgcatactgggttcaagcgattcttgtgcctcagccttcccagtagcgggactacaggcatgcaccactatgcctggctaattttcatacttttagtagaggcggggtttcaccatgttggccaggttggtcttaaactggaataggaattaaaataaattaaagaatgtgtaaacagaaactcagctgtatgtaagaaaacccaattctccctgagaaagagaaagagctggagtcctttaaaaattaactgcctgtttttctgtggctagtgagccttatctcttctttcccaggcactgtttctctagctgtgcagctgcaaggtcactagacagataaactcaagtcgtaaaacatgtttttccttgaaaagtaagaatgatgtaatgcatgtctcaattaattgaataactgtctttctttctcgcttctgtaatatgcttccccctgcacagatctcccccaaccccacaaaatgcttaaaagataacttagctctttgttcagggctcagtcctttggatgtaatccgactaggccagtgaacctaaataataaatatcctcctcaacccctcggtctccctgattctttaaaatatcctgcaacatttctgggggcttatctgggtttggagatgatagatttactgtctcctttgccagtgtgtctagggccccggggatgggggagacccagcatccaagacgcaccatgagggggtttcacctggatggagaccagctctccccatgtcctggtgccctgcccagcagtgcaacagaactggggacagagatgcaggacaataccagcacttcaggaaccacgataaggagtagtggcccaaggcaggaaagcccgtcccatagggatgaaggggactgaccattaatccaacccagagtggctgggggcagcaggagtggcctgccaatttgattgaacctcgtgtccccactaacaaagtgaaaatggttcacagaatctggagacaggaactgggggtgtgtgggtgcatgtgaacctacctgggacatgagagaggctcatttcatccgatgaggagtcctggggtaggagtgatgggtttatgtgtgtgaatgtgggagcctaactaggctcacccaggacacaagagaggttcatttcatccagtgaggagtcctggggcaggggaggtgtgtgaaagtgtgtgaaagagatggtctcaggagaggccaacatggggactgatgtggggaggcacagatcccttagtgcaggctgtgtgctctgaggcgagtgtaggcaaaatcaaacctaggatgttgcatacggctgataggatcagctttgcagctgcagcaggctgtgacaggggaaggcacattcctggctaagcagcatccaaaactcctgtaataggacccagtctggtgaacctgagggtgaaaatgagagtgagagtgcactgcaagggaggaaatgagagggaaagcattgaaaccaactcctttggagtgcacgataaagaatttttttaaaaaaggatttagaggtgattatgggatgaaactggatgttcaaaagttaaagacatactgtgaattagaatagccctgttttagtgttggatggctggccgaaggcactatagagaaattggccatgtgttttaaggtggtgactaggatcagaggacagccaggacattcagacctagtctttatattgactcatggctaaatgaatgcagccctgcttagcagtttattgtagaacgctcacagctcatgccaagagaaaccagctgcactggcagctacagagttaaagggaaagtcacagaggcttatagcaccaaaagcaaaaagtgaaagccaaaagtgaaagtaaaaatcagccaccctggcagctatggagacaaaagaaaagtcttaggaaaaagaaaaccagttttgcaagaaccacaggagggaatagagacccctcctccctacattccaatctacccccctttaccaaggctaactgcccctaaggagttaagttcaaagagatacaggctcccagtctcacccgagaaagagaaatcagagctctgggaagttaaagcgaaaggctggaaaagtcaggcaggccatctcaggtcgagccatgcccaagttatgcttctgcctctaaaaaggacaagaggacccccaccaggatgcagatgatgcagtccaccttcagcacccacaaaagtgccgagaagcacttctgcaaaggctaaaggatggtaaaagaaaaaggcaaccaatataaaacatctcagaggtgctccagggtgcagataaaagcaccagccagttttatgaaagactttgtaaggcattttggttgcacactccatttaaccctgaggctgctgaaaatcagtgcaaggtgaatacggcatttgtaaggcagacccaaggagatatcaggcataaattgcagaagttagaagctctgtaggcatgaatgctactcagcttattaaagtggctaccagggtgtacattaacgagatcaggaggcaaagaagaaagctgatcagaggcttaagaaaggctaatttactagcagcagcccttgtgggaagagaagctggctttgcaaagaggcatggacgcaggcgtgaacacagtcacggaaaaggctagtccggacaggagtttgaaagctggccaaggctagagagagatttatgtgcacggtgcaaaaggaaaggacactagaaggatacacgtcaaaagaataaggagaatgggccgggcatggtggctgacgcttgtaatcccagcactttgggaggccgaggcaggtggatcacgacgtcaggaggtcgagaccatcctggctaacacggtgaaaccctgtctctactaaaaatacaaaaaaaaaaaaaaaaaaaaaaaaaaaaagccgggcatggtggcaggcacctgtagtcccagctactcgggaggctgaggcagaagaaaggcgtgaaccctggaggcggagcttgcagtgagctatcgcgccactgcactccagcctgggtgacagagcaagactccatctcaaaaacataaaaagaataaggagaattgtcaaggccatggtatgaaaaaaaaaaaccaccggccaagggctactgcacccaggaaaaacccaagaccccctgcacctgctgtgaaaggcaggatataaagtatcagaaaacagctcaaatctgctctaaaagtgtccagtatttaagcttttatataaaccaagaggaaagatggcttagtagtaaacaaaagcaggctgtttgtgtacttcctactccaacaacctggtgtcaaataagagagttcctaagggcagcaaggttctgccacatttagatcccaaatttcttgctcatggctaagccattatacaaagccacaaagaggaggaaagaaagagcctctcctctaggaggccaaccaggagaaggcttttatttatttatttttttttgaagccactccacaagtcactctatattgcaaattatacataatagtacacctaatcaatatataaatgttatgggttaaacatctacaacaaacaaaataacatttaacatcaagagaaaagaaatgggaaaaaaaggttaatgaaccagtccatgaagagcaacagagacaaaaagaatctcctggtctgggccaggcagtccagtggtcttgcaaggaacacctttgatgtgggtagagcctttcgtggcagatgccagagcctttcatggcagatgccatggagcttatcttttttttttttttttttttaaattgatcattcttgggtgtttctcgcagagggggatttggcagggtcataggacaatagtggagggaaggccagcagataaacaagtgaacaaaggtctctggttttcctaggcagaggaccctgcggccttccgcagtgtttgtgtccctgggtacttgagattagggagtggtgatgactcttaacgagcatgctgccttcaagcatctgtttaacaaagcacatcttgcaccacccttaatccatttaaccctgagtggacacagcacatgtttcagagagcacagggttaggggtaaggtcatagatcaacagcatcccaaggcagaagaatttttcttagtacagaacaaaatgaaaagtctcccatgtctactactttctacacagacacagcaaccatccgatttctcaatcttttccccacctttcccccttttctattccacaaaaccgccattgtcatcatggcccgttctcaatgagctgttgggtacacctcccagacggggtggtggccgggcagaggggctcctcacttcccagtagaggcggccgggcagaggcaccccccacctaccagacggggcggctggccgggcgggggctgaccccccacctccctcccagatggggcggctggccgggcggggggctgacccctacctccctcccggatggggtggctgccgggcggagacgctcctcacttcccagaccgggcggctgccaggcggaggggctcctcacctctcagacggggcggctgccgggcggaggggctcctcacttctcagacggggcggccgggcagagacgctcctcacctcccagacggggcggcggggcagaggcgctccccacatctcagacgatggggggccgggcagagacgctcctcacttcctagatgggatggcggccgggcagagacgctcccaggagaaggggtttaaagaaatcaaaaaagcttgactcaggccccagctttaggactgccggataaactaactaagcctatcttcttgtatgtccacaagtgaaagggaggccataagggttctaactcaagccataagtttatggcatcacccagtgacatacttatccaggcaattagactttgtggcacttggatggcctctttgttttaaagctattaaagcactagctgccactgccctactggtgcaagaagctaataaactgactttagagactgtgaatagcctaaacctggctacattgctcctcatcaagtcagtgccaggagacccctttcatttctgtgtcaacatgatagatgaagttttctcaagccagagagatttgatagcccctcagggaaactggacattaaatattttactgatggaagcagtttcatactaaagttttatgaaagactttgtaaggcattttgattgtgcactccatttaaccctgaggctgctgaaaatcagtgattttcactaaaatcactaaagggagtctgccgagctgggtatgcagtggtgactttggactcagtagtagaggtgcagtctctgcctacagaaacttctgcttagaaagcagagctaatatctctgacaagagctctctggctagcaaaagaccaaaagacaaatatttacacagattccaaatatgcttctgccactttgcatgttcatgaggtgatttacaaagaaaaaagacttttaactgctgaaagtaaagaaataaagtacaaggaagaaattctacagctcttaaatgctgtataggacccaaaagaggtggcagtgatgcactgcaaggggaaccaaaaaaggaagaacactaaaggctaaaaaaataaaaataaaaaagcagacaaagaggcaaagcaggctgcaatgacaactccaccttctaaagaggaagtcttagctatgcttctcttcccagagattcccctcccggagatcccaagctatgctccaagtgaaagggcttgttttgcccagaaaaataagaactacactaaaggaagatggtaaaaattctccagtgggaggctagccataccagaaatggtgacctccagatttgtaaaacaattccaccaaagaactcacataaaaaaaaaaaaacagcactaaagacattattaaggcatcatttctatgcaccatggctcactgctattactcaagccatttgtaaacaaacagtgtttaacttgcactcagaacaatccatgacaaggagggcctactccgcccctgggagttcaggaaacaggagccagggagccgtgccctgtgaaaaactgcttatagacttcacctaattgccctgagagggagggctatcagtacatgttggtgttcatttgcaccttttcaggataagtcaaggccttcctcacccagacagggaaggcactagaggtgaccaaggtgttgttaaaagacattattcccagatttggactgtctctaactctaagatcaaacaatggaccaacatttgtggctgaaatagttcaggactttacttgactattaaaataaagtggaaattacatacagcctacaggccgcagagctcaggtaaagtggagtgcataaaccagacactcaaacagctgctgaagaaattttgtcaaactcatcaaaagtaggatcaggtcttgtctgttgtcctcctccgagtcaggtgcactcccaccaaacaactgggtattcgccctgtaagattttattcagccagccaccccccatcataagtcagattaaaggtaatctctgtaaactagaagaactaactttaagaaggcaaattcaggctttaagtatggccatgcaaaaatgcatggctaggtatagaaaaaaaatgcctataagtcaaacagacccagtacaccctttcaaacctaaggattttgtttaagttaaaaaatggaggcagggtgtggtggctcacgcctgtaatccaagcattttgggaggccaaggcaggtggatcacatggtcaggagatcgagaccatcctggctaacacggtgaaaacccatctctactaaaaatacaaaaaattagcccggcatgatggcgggcccctgtagtcccagctactcaggagtctgaggcaggagaatggcgtgaacccaggaggtggagcttgcagtgagctgagattgcgccactgcactccagcctcggcgacagagcgagactccatctcaaaaaaaaaaaaaaaggaaaaaaaatggaatccaaccacactaggacccatataggataggccccatatcgtgatcatgcctagtcccactgctgttaaagttgcacgtttcacaccttggattcaccatagtcggctgaaaccagtggcagcagtgactcccaacgacgaacagtggattagccaacaagacccagattgccccacccgaatagtcccatggtgaaacccaaccaccggtaagaaggacaactgccctgctctgaccacactggaggctggtcagtctatgcacggctgaagcttgaggatcctgtaagctctgctctagtcacatcctggaagctgactagtctacgcacagccaaagctaaggggacaatctccggataagtaaatgtggatacaatttataagcctagttataattctgtcaatactgattgttctgttgttatgttattactgcaaatactgcaaacgtctatgcccagaggaaggtttgccatgcccatgtgtagtgtaagcatgtttctattacatacactgacgttgttaccatttctgcctatactagaaggggagaaatccctagaagaatgcccacactgtgtacacactacctggataaggaataccctagttaaacctctactgtacgttactgactatgaatgtacaggaacaaagttaggaacctgcacatacaaccggaaacagtctgcaatagtttaacacaagagagacttagcagcaacagtcctaaacatctgtacagaaaaccacaaatcagatgtcgagactgaacattcagtggtctatgctaacacagctccaacacttacattcaggaaggactgctctgctaattagtatgtcaaccaaaccagattgtaagacaagaacatacaatcctttaaattttactatcttaaagccagagctaccttcttggtctacaggacagatgacactattatgagttgatagacaaggagcagaacttggagttccactactaattgtcaaaaagactagaaggactcaaatgtatccaaccccacaattccaggtccataagtcattctataagcattttgatcagtcaatgctgaagcttccccccatcaaccaaaaacttatttgctcaactagctgaaaacatagctggcagcttaggaatttcctcatgctatgtatgtagaagaactaatatggaagaccagtggccatgggaggcaaaggaattaatgccacaagatcccttcacttaacactgccagtgaaccaacagcctcagccagtgtttggttgtcaactacctccataattggaaagtactgtatcacccgatgaggaaaggctttcacagaggcagtgtgagaaacaacctgcctagggcaacagtattgtgatgagactaaaaacaaaactctatggagatccaaaccctttctctcaattctctactctaagccacacttggcatcagctagaggctccaaattcttgaaaggcaccctctggcctatattggatctgtggagcacaggcatatcagcaactgccagctaaatggacaggggcatgtgcgttaggaacaatcaagccatcattctttctaattcctctaaagcaagaggaactcttagggtatccagtttatgataaaaataaaaaaacaactagaagcataataacaaaaagagacacaaatatcaaaaaagatgtggacataggaaactagaaagataataaatggcctcctgaaagaatcattaaatgttatgggccagctacctaggcgcaagatgggtcatggaggtaccgtaccccaatctatatgctcaaccgcatcataaggttgcaggcagtccttgaaattataaccaatgaaacctcaagggcactagatttattggcaatacaagcaacacaaatgaggcatgccatatatcaaaataggctgggtttagattacctattagcctcagaaggaggagtatgtgaaaattttaatttaaccaactgttgcctagaaattgatgataatgaccgagctgtcatggaaatcacagctagaatgcacgagttcacctatgttccagttcaaacttgatctgggtggtccctggattccttgtttggaggatggttctcaaccttaaaaaaaaaaaaattaaaaccctcattggtgggttcttgcttatttttggcatctgcctcatcctcccttgccttttacctctgtttattaggagtattcagtcaactatagaggcaatagtaaccaaaaaaactaccgtgcagttgatggcattaacaagattatcagccactgccagtagaagaagaagcacagccctgtgaagaggtgacagatagtggtgctttctgttaacatctttgttataaaaagcaccaaagggaggaatggaacaggaataaaaagaaattaaagaatgtgtaaacagaaactcggttgtatgtatgagaaagagaaagagctggagtcctttaaaaattaactgcctgtttttctgtggctagtgagccttatctcttctttcccaggcattgtgaagactctgtttctctagctgtgcagctgcaagatcactagacagatcaactcaagtcataaaacatgtttttccttgaaaagtaagaaatgatgtaatgcatgtttcaattaattgaataactctctttgtttctcacttctgtaatatgcttccccctgcacagatctccccctgccccacaaaatgcttaaaaggtgacttagctctttgttcagggctcagtcctttggatgtaaatctgactgggtcggtgcacctaaataataaatatcctcctcaatccctcagtatctctgattccttaaaatatcccactacagaactcctgatctcaggtgatctgcctgcctcaacctccaaaagtgctgggattacaggcatgagccattgcatgtggcctaaaaaataatttctttaaaatggtatactctgcatcaacattgacacaaaagcttctgttaaactctgacacccactcagatgtcacctcctctataaaaccctccttgatttccctcactgctatctcagggggagaattaatcactactaccatttggctgcctcaataccttatatctttttatgtacaagcattattctccagaataaattaatcatttatgcatctatccacactaatggactataaatggggcagatatgttgaaccctactcatttatgtaatccaaatatctgatacataataggtgttatatatgtatacacatggaatcaaaatgctctcagggaattattggaaaagctaccaaattctttttattttttaattttttttaagttcttttaagttcaggggtacatgtgtaggtttcttacataggtaaatatgtgtcatgggagtttgttgtgcagattatttcatcatccaggtattaagcctagtacccattagttgttttttctgatcctctctctcctcctaataggccctagtatgtgttgttccactctatttgtccatgtgttcgcaccattcaactcctacttataagtgggaatatgtagtatttagttttctgttcctgtgttaatttgctaaggataatggccccctgctccatccacgttcttgcaaaggacatgacctcattttttatggctgcatagtattccatggtgtatatgtaccacattttctttatccagtctatcattgatgggcatttaggttgattccatgtctttaatattgtgaattgtgctgcaatgaacatacacatgcatgtctttataacagaagaatctatatttctttggctatatacccaataacaagattgctgggtcaaatggtatttgtctttaggtctttgaggaatcaccatactgtcttccacagttgttgaactaatttacactccctccaacagtgtataagtgttcctttgagaaaaacaaaaatctcaatgttctaagaggttagttttttaggcaaatggtataccaagagactgtcctcaggcccaggccatccagctgctcctctgagaggctacactcttattcctcagactgtcctctaagagatgacccaggggatgatattcattagacactccaagagatatggccattatgggcatcttgggttatcccagacagttctaatactcatgaacaagaaaagaccggagggctgctgtaaagagccctgtaatttctccaaagcaaaactgcaacccaaagacatactaataaggtgtgtgtgcctagggaagataaaaggaagagaggcacacagattttttttttttacagtgaagtgtcagaggattattttctacttttcttttctacatttgagaatgtaggaatgaaagtggaaatgtataattttactgcaagcctgagttaggctaggggaaaagagtggtggattagaggccctgattgccatacattaggaagacacagaagaaaaccagtcctgctctccctctccctctccctctctctccacggtctccctctgacgcccagccgaggctggactgtgctgccgccatctcggctcactgcaacctccctggctgattctcctgcctcagcctgcggagtgcctgggattgcaggcgcgcgccgccacacctgactggtttttgtattttttggtggagacagggtttcgccgtgttggccggactggtctgcagctcctgaccacgagtgatctgctagcctcggcctcccgaggtgccgggattgcagacggagtctcgctcacttagtgctcaatgttgcccaggctggagtgcagtggcgtgatctcggctcgctacaacctccacctcccagccgcctgccttggcctcccaaagtgccgagattgcagcttctgcctggccgccatcccgtctgggaagtgaggagcatctctgcctggccgcccatcatctgggatgtgaggagcccctctgcccggccacccagtctggaaagttaggagtgcctcttcccggctgccatcccatctgggaagtgaggagcgtctctgcccggccgcccatcgtctgagatgtggggagcacctctgccccgccgccccatctgggatgtgaggagcacctctgccctgccacccgtctgagaagtgaagagcccctccgcccggcagccgccccatctgggaagtgaggagcccctccggccggccgccaccccgtctgggaggtgtacccaacagctcattgagaacaggccatgatgatgatggcggttttgtcgaatagaaaaagggagaaatgtggggaaaagaaagagaaatcagattgttacggtgtctgtgtagaaagaagtagacataggagactccattttgttctgtactaagaaaaattcttctgccttgggatgctgttgatctatgaccttacccccaaccccgtgctctctgaaacatgtgctgtgtccactcagggttaaatggattaagggcggtgcaagatgtgctttgttaaacagatgcttgaaggcagcatgctccttgagagtcatcaccactccctaatctcaagtacccagggacactaacactgcggaaggccgcagggtcctctgcctaggaaaagcagagacccttgttcacatgtttatctgctgaccttccctccactattgtcctatggccctgccaaatcccccaagaatgatcaataaatactaaaaaaaaaaaaaaaaaaaaaaaaccagtccttctgtggagtgttaaaaatcattaaagagcacgaacttagactgaagtggctctagtgccctgtgttcattggtaaaaaatctaaaacctaactcaaatgcatgtcttataaattactcttaggcagaaacaaaattcaggcttatccaatcataaacctgcaattaacctgattacataaccaggaaatttctacctggatcatacaaataaggtgacaacataactgtaaccaattattgaatctggtttgccttctgacacactttataaaacccttttctttttttttttgagacggagtctcgctctgtcgcccaggctggagtgcagtggcgggatctcggctcactgcaagctccgcctcccgggttcacgccattctcctgcctcagcctcccaagtagctgggactacaggcgcccgccactatgcccggctaattttttgtatttttagtagagatggggtttcaccgttttagccgggatggtctcgatctcctgacctcgtgatccgcctgcctcggcctcccaaagtgctgggattacaggcgtgagccaccgcgcccggcctaaaacccttttctttatgcccctcaggtggacctcaaatcatggctgggtgctttccatttcaccaatcactgtttgctcaaataaacttgttaacgttttaacattgactccctttaatttttaacaggagagactgagcatggtggctcatgcctgtaatcccagcactttgggagaccaaggcgggtggatcacctgaggttgggagttcgagaccagtctgagcaaccttgagaatccccatctctagtaaaaatacaaaattagccgggcgtggtgctgcatgcctgtaatcccagctactcgggaagcggagacaggagaatcgcttgatcccaggaggcgcatgttgcagtgagccgagatcgcgccattgcactccagcttgggcaataagagtgaaactccgtctcaaaaaaaaaaaaagttaatatgcagaaacagtgttaatcaataggacagccctcagacatggtttgtggtttgggggctaccagcgggtcttgaagaaaaggctcctataaggtgtatgagaaagcaaagcaaattaaatagctgattggatacagttaggtagtcgcttcatttggagtgtccaggagaagattttctggttatgtaatcagggattaattggagatttatggttgattaagtctgaattttgttttctcctaaggtagtaacttacacaaaatgcatttgagttagattttttttgttgttgttacataggcacctagaccactagagccattccagtctaattacctgctatctaattattttaactttattcaggggctctggtgtccccctacattttccaaatgtgtggcaagcaggtcctcaaatccactactctgttctgccagcctaacttggcttgcagcaaaatcttattttttatttttatttttatttgagatggagtttcgctcttgttgcccagactggagtgcaatggctcaatctcggctcaccacaacctccgcctcccggattcaagcgattcttctgccttaacctcccgaatagctgggatcacaggcatgcggcaccatgcctggctaattttgtattcttagtagagatggggtttctccatgttggtcaggctggtctggaacaaccgacctcaggtgatccgcccatctgggtcccccaaagtgttgggattacaggcatgagacactgcgccaggccagtaaaatcttaaatttccagtttctttcaaatatttcccagagccaactcctcccctccaattcacaacattatcaactatttttgtcctttattttacattttagaaacagcattttaattaatcacttattcacagagctgtggatggcactctttaaaatacttgttttctttcctttttttttttttttttttttttttgaaatggagtctctcactgtcacctgggctgaagtgcagcagcacgatgcgatcttggctcactgcaacctctgcttcccgggttcaagtcattctcctgcctccgcctcatgagtagctgggattacaggcacctgccaccacgcccagctaattttttgtatttttagtagagacaggtttcactctgttggccaggctggtctctaacacctgaccttttaatccacctgcctcggcctcccaataaaatagttgttttctatttgtaaattttttcatgagaggaaagcataaaatcatccccttacactccactgtcaaaaatctttctgccttttctccttttatcttccctaggcacaaatgccttatcaggacatcgttggattgaggtttccctttgaaaacttgatggggccatgtgtcctcagccacactctgatctctttctagtcttgagttttagaactgtcttgggatggcccaagatacacacaacagccatgccttttggaagctttggtgacgaccagccccttcgtcttctccttccagaggacaccctgacatatgggaatgtagcttctcaggagagcaactgaatgccctggggctcagataaatatcctggcttacccttcccataaaaacagaaccttttgggattttaagattttcttttcccaattccagttcttgctggttagccaatcagatggtggtatttagagaaaaaggcagaaatcatgtctgtcctcagaatagtgtcatatttgtgaagggagaaaaactatgctgaaagacgaaatagacctaccccatggaggcaatgcaagaacctgcaaagcaaaaaagtaccagggacacagagtggggtacagtgcagtgtcttctgggagggtgatctttgagcacttcggtgagtagggtaagggtgggagaatgtcccaagtgatagggttgcctgatttgacacttgagtcagatatgtgtctgttgcaataaacactattactccctgagtttgccaccttgaacagatttgttcacttatttcaactttggttttttattagatgtaaattgaattttatcatcagagctcaaaaggcaaaaaacatacttacaaagggcatgaaagaggttaatttcagaaaaaattaaatatttggtcatatgttttacttagtagaaattcttatttacttctttctccaccagagtgagtgcagttaaatttctttggtctgtcctttttggggcatgattacattagtttctcttttttgcaagctgcagaatttttaatattttgaatctcttttctgtatcttgtcacctgaatgtgtgagtctgatgctaaattttgttttttgttgttttgagacagagtcccactcagttgcccaggctggagtgcagtggtgcgatcttggctcactgcaacctctccctcccaggcttaagctgttctcctgcctcagcctcccgagtagctgggattacaggtgcccaccaccatgcctgactaatttttgtatttttagtagagacggggttttaccatgttggccaggctggtcttgaactcctgacctcaggtgatgcacctgtcttgccctcacaaagtgctgggattacaggcgtgagccaccatgcctggctgaagctaaattttataagatggtacttggcatcttctagaagtatttacatattattaacttaattatttattaaattttgtttttcaagatggagtctcactctgtcacccaagttggagtgcagtggtgtcatctcagctcactgcagcctccacctccagcgttcaagaggttctcctgtctcagcctcccaagtagctgggattacaggcatgtaccaccacgcctagctaattttttttttttgagacaaagtcttgctctgtcacccaggctagggtgtattggcgcaatctcagctcactgcaagctccgcctcccagtttcacaccattctcctgcctcagcctcccaagtagctgggactacaagtgcccaccaccacacccggctaatttttttgtatttttagtagagatggggtttcaccatgttagccaggatggtcttgatctgacctcatgatctgcctgccttggcctcccaaagtgctaggattacaggcatgaggcactgcacctggtccttttttttttttttttttttttgaggagtctcactctgaaacccaggctggagtgcagtggcagaatcttggctcactgcaacctccacccccctggttcaagcaattcccctgcctcagcctcccaagtaactgggattatagacacatgccaccacatctagctagaattcctgattaaagttaaaataattagataacagctaattagactgatgtggctctagtggtctaggtttctgtgtaacaaaaaaaaaaactaactcaaatgcattttttgtaagttactaccttagaagaaaacaaaattcaggcttaattaaacataaatttccatttaatccctgattatgttaccagaaagttttctcctggacactccaaatgaagcgactacctaactgtacccaatcatttatttaatttgcattccatcctcatacacattatagaatccttttcttcaagaccctctggtagcccctgaaggggtggcctgcccctccacacctgtgggtatttctagtcaggtgggactgagaaaagaaataagatacaaagtatagagaaacaacagtggacccaggggaccggcgctcagcataccaaggacctgcaccagcactggtctctgagttccctcagtttttattgattattattttcattatttcagcaaaaatgaatgtagtaggagagcagggtgatgataaggagaaggtcagcaaaaaacatgtgagcaaaagaatctatgtcataattaagttcaaggggaggtactatgcctgcatgtgcacgtaggccagatttatgtttctctccacccaaacatctcagcggagtaaagaataacaaagcagcattgctgtaaacatgtcttgcttcccaccatagggcggtttttctcctatcccagaatagaacaaatgtacaatcgggttttatactgagacattcagttccccggggcaggcaggagacagtggccttcctttatctcaactgcaagaggctttcctcttttactaatccacctcagcacagactctttacgggggtcagactgggggatggtcaggtctttctcatcccatgaggccatatttcagactatcacatagggagaaaccttggacaataccccactttcaagagcagaggtccctgcggctttctgcagtgcattgtgcccctggtttattgagactagagaatagtgatgacttttaccaagtatactgcttgtaaacattttgttaacaaggcacttcctgcatagtcctagatcccttaaaccttgatttcatacaacacatgtttttgtgagctccaggttgggtcaaagtggctggggcaaagtggctggggcaaagctacaaattaacaacatctcagcaaagcaattattcaaagtacaggtctttttcaaaatggagtcccttatgtcttccctttctacatagacacagtaacagtctgatctctctttcttttccctatagcccccaaaccacaaactatgtctgggggctgtcctattgattaatcatggtttgtacatattaactttttttttttttgagacggagttttgctcttgctgcccaggctggagtgcaatggcacaatcttggctcaccgcaacctgaacctcctgggttcaagtgattctcctgcttccgcctcctgagtagctgggattacaggcaggcatcaccacgcctggctaattttgtattttcagtagagatgaggtttatccatgttgctcaggctggtctcgaactcctgacctcaggtaatccacctgccttggcctcccaacatgctgggattacaggtgtgagccatgccacctggccttaaatattttttatagaaataattaaatgacagattgtgggggattagtcaaaatggggggagaaattatagggaaaggagcaggccttttgaaaggtcagaaggctctgcaaaactttgtgggagaataagctgatggcagccgttctcttaccctgaggcagagggtgaggagtaggtacaagggaatgtaggggaatttatcttaaataggcttgtttgctcgtgttgtccagaagctgacctttgatcatccgtgctcttgactgctctctgaaagggggaacaataatgttaattacctgcagattgtgtttgctccaggctttccgtattatgtctgtactgaataaaagcaagcagctccagctgttcggggctgctctcgtctttgaccacaagtgctggccagtcctctagctgctcttacactgcatacctgtgtctgagtactcctttcattcatcaattggccagggtctatgggacagacctggcagctggtgccccatgtgaacaaagctgcaatggaaccctcaaaaacaaaggtgaagagactgtgcagtaagtaatcagtgcccattcaggatttccaagtttgaggggattttcaagctagggtttcatcatgggacaacagttatcagctcaacagcaacagcatataaaagtattgaaacagctgcttcaagctagtggagcctcagttttggaagcccaattaagggacctaatgcaaagtgttgtttttcataacccatggttcccagaggaaggcacactagacctagagctctgggaacaagtggggagaaaacttagatgacatcatgcgcaagggcaacaggtcccagtaacatctttaatgttagggggctttgttatggctgctttggccccgctctacacagaagtgcctaaaaagggaagggaggaagaaccatcatctaccttaccacctcctcctcctcccccagccctgctgttaccaggtaaaggtgccacagaggagacagagattttccctgtgccccctcccccagtaaattggaaaaaagacaagggatacactacagttatgggaccctgtcttaggcaagcagcattagaaggggagctcttggcatgcccggtgatgcaagatcaacaaggcaattgggtacatgaacccattacttttaacacctataaagatgccacagcagccaacttccatatgaccccatgagactggccactactagctaaaacaactttagaagccagtcaatatctcctctggaaggcagaatatgatgagttgtactaacaacaagccaaccagaatcagttggctgggcaaaacataacggccgctatgctccaggggaggggtccctatgtcaatgtacaagaacaattaattttgttccccaggcctatgcacaagtgtctttgtgtgctcgcagggcttgggactgaattcctgaagatggagttcaacagggatcttttgtgaatgttcaacaagggcctaaggagccatttgttatcagtcggttaacacaggcaattaagagacaaattagtcacgcccaggctgctgaaatcttattgttgcaattggcttatgaaaatgctaatgtagactgccagcaggcaatgcaggctattgtattaaagcctcctaaagtgaaaagggagaaaaacccaaattgttttctatgcggagagccaggtcatgtgaagtgggaatgccccaatagtaaagaccaaagtaactcaggaaaaaaaaaaaaaaaacccttctacatgcccccgatgtaaaaaggggaaacactgggcaaatcaatgcaagtccaaatttgataaaaatgtcaaccccctaagcaatcaggtgggacatttcatgaggggctggccccaggccccattccacactggggcaatgccagtggctttcctcggttagatggaaagcccacagtcctctctttcagagcagccaccttggggagcgcaggactggacttactctgccctgacaaattagtgctaaaagaaggagaacaccctaaagggttgcaacagggatctggggtccactgcctctgggaacagtgggactggtcctagtgcgatgaaacctatccagtaaaggagtcaatgtgctcactggggtaattgatagtgattaccaagatgagatattaattatgatttaatgtaaaggtctacatattcttccccctaaatctaaaatagctcagttactactcttaccatactgggttcccaatgcccagggaaaggaaaggggacaaggaggttttggaaacacggaagccacaggagtatattggaaccaatcaatcactgatcagagactcatgattaccttaaaaattgaaaataaaaattttactggcctattggacacagggtgaacattttgatcatcagtgatgaaaactggccagaaacttggccttgggtcactcagaaacaaaaaattgtcatcatcagggaagtgcacacagccaagcagagcacacaccccttaatatgtcatgattcagagagaaggaaagcagttatacaacctcaaatcatgcccatcccagttaatatttgtggatgggacctattagcccaatggggggttactctgcagacctctttctaataatggccactgttgttattcctcccctacccctgacgtggctctctcaagatccaatttaggtagaacagtggcctttgaagggagagaaattacaatgagcccataaattagttgaggagccattaaaagctggccatttagaaccatcagacagcccttggaattcacctattttcgtcattcccaaaaagtctggtaaatggaaacttgtgcatgacttatgtgctatcaatgctaatttgtaacctgtggggccccttcaacaggggctccctttccccacggtgattcctcaagattggcctatattcattattgacttaaaagactgcttttatattatttcccttgcagaacaggaaagagaaaaatttgcatttacaataccagctataaataatgaaaggccagctcctccaattcattggaaagtacttcctcaaggaatgctaaacagtcctaccgtgtgtcagtatcatgtaaatcaggctttgcttcccagtagaaaagaatttcctaattgcaatatcatctggatgacatcttactggtggccccaatggagccaatacttttgagtttatatgcccctgtcaaaaggaatacacagttaagaggtttaatcatagcacctgaaaaggtacagatgtcctccccttggaaatatcttagatacatactaacttcccggtcagtaagacctcaaaatgttaaatactagcaacttatataccttaaatgattatcaaaaattactaggcaatattacctggcttcaccccaccttggacataactactgataagttgcagaacctgttttctatcctaaagggcaatgaaaccctggacacccccaggtatttaacctccactgcaaatagggtaattgaggaaatagagcaagctatttctcataggaaactagattgcatagacccacaatattcagtccagttgtttgtttctcctacaaaacattccccaacaggattaataggacagatggccccagggctgtgcttcctagaatgggtttttgctcacacactgggactaaaacactgtccccctatatccagctaattggtaaagtcatttatacaggccacagatgatgcaatcgattgcaaggttatgactctgatgtcataagaatacccttaagtaaaaaacaattcgaaggagtcctgcccttatctctagattttttcttttttttgagacacagtcttgctctatcacctaggctggagtgcagtggtgcgatctcagctcactgaaagctgcaagctctgcctcctgggttcacgccattctcctgcctcagcctccctgagtacctaggactacaggggaccaccatcacacccggctaattttttttgtatttttagtagagatgggctttcactgtgttagccaggatggtctcaatctcctgacctcgtgatctgcctgccttggcctcccaaagtgttgggattacaggcatgagccaccgcacccgaccttatctctagttctttaaatagcactctctgattatgtgggccatatagaaagtacccttcccgctgatgaactactctagctcttatactcctgtaattatgcctacaaaggtagttcactcccccatacctaatgtgctttaacagttttcactgatggctctggtaaaaatggaaaagcagctatctggtgggaaccgcataacttcctcactcgatctagatttactagtactcagctaaagttggagccctagtattggtcctggaaaccttttccactcagcccatcaatattgttaatgactctgcttactccatttatttattgcaaaaccttgaaacagtcctcattaagtcaactcttgagcccactctgtgtgccctttttctttgacttaagaaattgctacattaacaaacacatcctgtttttatcacacacatttgggcccaaagcttgctgcccagcccactagttcatgacagcaatcaagcagacctgcaggttatgacgtcacttgcttgaccaagccacccaatcacaccaatttttccaccaaaactggagaaacttaactaaacaatttcaatttacccaaagactagataaacaaattatcctgcaatgcccagattgccagctcacaggcacatcccctccttcaacagatgttaaccttagaggactagaacctaatcagcatggcaaacagatgttacacatgtccctgaatttggaaaactaagatatgtacatgtatccattgatacctattcccacctaattagcgctcatgttcttcctggagagtccatccaatatgtcattaaacatcttctcttaacttttgcatttatgaggtggcccccaaaaaattaaaactgataatggtccggcttatgccagctcacagtttcaccaattttgtcacacatggaacatcctacattccaagacatcccatataacccccaaggacaggctataataaaaagtgtccactctgcccttaaatatgctcagaaaacaaaaaaggggaaatatgagtaaggaccctgcaacacttttggcacaagccttatttaccctgagtttcttaaatttagatgataaatttcaatcagctatagacaagcaccttgcaaaaatcactcaagatataaaaccttcagttttatggaaagatgtaaatagtaatgtatggtgtggtccagatgatttgctaacatggggaagagggtatgctcgtgttcacaccccctcaggtcctctttggattccagcacgaggcatcagaccttaccatggcttggctaggacccaactcggtatcagaaatgaaggaaatgacactgcaggacctaacagccctggacgatgtggcttcctaggacaacacagaccccggacattatgctgaagaagataacttaggaggctgagtgaatcctggtccagacacagacacattcactccagataatttgttccttgctatgctttctgttgtacattgcaactcttgtagggtattaaccttttttattctctcactttgcctgctactgttggaggccaaaggaatgagggttgtgaccaactcagtataccactggaggctatatgagcaaacagcaaactgttcttgttaggagccaaaagcctgacggttgtgaccaactcagcatcccactggaggctatacgattaaagagcaaactgtttatcatgaatgcaggatgtgggcaaactcacatctgtgcctgccaccagaagatatgctgagggcagtcactccctggcactgtgctccttgcagttgtctactggaacatctggagtctactgttcaaagaaagcattcgtgcaggcctgcactaaatcaagcagctgattgacaaccacccctttctccctatttcctttacttaataaatacaaagggctctagaagctcaggggccttgctccctagaagcaaggagccccctgaccccttcttgaaaacatactctagtgtctttttctttattcccgtgttcgtcctctgttccattttccaggctccatgacaagtggcaccaacaacagggacttcaaggacgtgacgaagaaggtctgctagagcagaggaagtgaaatttaccagatgaaccgggaccccaggacgagtctgtcagcagggaatataaggccagtgctctaaagaagtactgaggatgggaagtctctgaatcagggtaacatggggtagaatttgtctgttgaagaaaaacattatgtgcagttgtttaaagttttattgaacacagtctggagctcaagttaattcacagacattaactaagcttctgcaggaggttattacacataacccatggtttctgcaggcaggcactctcaatgtggaaaattgggacagagtaggagacaaattgaaatgggctcatcaaaaaggtcccaaagtagacccttctgttttttcctcttggggttttgttcacacggtcctacagctgttgtctccttcttattctgtcacacaacaggagccaggttctgagtctcaagatttaaaaaaattatttgttcctccaactgggcctattgaaaacaatgagcaggagaaaggagaggagaattggccccttgctaagcaggaaacaggagaggagaattggccgctgccacaccctccaataacagaagtagaaacccccatacaaaaaattttgtgcactgctgctgtggctagggaacctttaggaacttgcacttttcctattaccataaggcctgacctgaatgatccgcaaaatcttttaaatgaacacactcctgtagagtttaaattactaaaagaattaaaagctagtgtggtcaataatggagtgcaggcccgggcacggtggctcacgcctgtaatcccagcactttgggaggctgaggcaggtggatcatgaggtcaggagattgagaccatgctggctaacatggtgaaactccatctctactaaaaatacaaaaaaaattagccaggtgtagtggtgggcccctgcagtcccagctactcaggaggctgaggcaggagaatggcataaacccaggaggtggagcttgcagtgagccaagatcacaccactgcactccattctgggtgacagagcaagactctgtctcaaaaaaaaaaaaattatcttgggctaccctctttgtgtcccctccctttgtatgggagctctgttttctttctttctttctttctttctttctttctttctttctttctttctttctttctttctttcttttttgagatgtagtttcactctttttgcccaggctggagtgcaatggcatgatcttggctcactgcaacctccacctcctgggttcaagggattctcctgcttcagcctcccgagtagctgggatgacaggcatgcaccaccatgtctgactaattttgcattttttagtagagacagggtttctccatgttggccaggctggtctcgaactccctacctcaggtgatccacctgctttggcctcccaaagtgctgggattacaggtgtgagccactgagcctggcctgggagctctgttttcactctattaaatcttacaactgcactctcttctggtctatgtttgttacagctcgagctgagcttttgattgctgtccaccactgctatttgccgccattgcagacctgccactgactttcatccctccagatccagcaaggtgtccactgtgctcctgatccagcaaggcacccattgctgctcctaatcaggctaaaggcttgccattgttcctgcatggctaagttcctgggttcattctaatcaagctgaacagtagtcactgggttccatggttctcttccatgacccatggcttccaatagaactataacactcacctcatggcccaagattccattccttggaatccgtgaagccaagaaccccaggtcagagaacataaggcttgctaccatcttggaagtggcctgctgccattttggaagtggcctgccaccatcttgggagctctgggagcaaggacccccccccccccggcaacattttggtgaccatgaagcgacctccaaagtggtgagtaacattggaccacttccgcttgctattctgtcctatccttccttagaattggaggaaaatactgggcacctgtcagctggttaaaaacaattagcgtggccaagggacttaagactcaggtgtgaggctgtctgggaagggctttctaacaacccccaacccttctgggttgggaatgttggcctgcctggaaccagcttccactttcaattttcttggggaagctgagggccaactagaggcagaaagctgtcatcccgaagtcctggcattagccagttgagattatggcacagccagaagtctctactcaacagtcacccatgtgtgtgcccccacctttccttctgacccataactcctgggtcctgagcatgactttcttgaaaatatagccccaaaattctccttacctctgaatctacttcctctgatctctgcctcctaggtactaatggttcagattttcatttcctctagcaagttgtatctccaaagggatctaaggaaactctatgctgcatccttaggtatctaggctataaacccagggagtcttgtccctggtgcccctcctgatttaggtatacagctttcaacatgggcagttatgtgggacctgttccctaccaccctggcaagggccccaactttgtaaatggctaagagaagagagacagagagagagagacacacacacagagagagagagagagacagagagagaaacagacagagaaagagagacagacagagaggagagaggaaagagaggcagagagacaaagagggagtcaaagagagaaagaaagagaaagatagaagtagaaaaaaaaagtgtgccctcttcctttaaaagccagggtaaattaaaaacctatagttgagaaatgaaggtcttatccatgaccctataacactccaatactaccctgttgtcactgtaaacaagggcgtagcctgaaaacactgagaccactgaccacccgtagccttcttatcaaaaatccttaacccagagaccgactgatggcccaagtgcattcaatctatagtggcaactgctttcgtagcagtagaaagtagaaaagtaacttttagaggaaaactcattgtgagcacacctcaccagttcagaattagtttaaggcaaacaagaaaaaagtagcttactaactcaaaaagtcttaaaatacggggttattctgttagaaaaaggtaatttaacactaaccactgataattcccttaacccagcagatttcctcacaggggatttaaatcttaattactatacaaaggtccaaccagacctaagaggaaatcccttcaggagaggatgatagatggttcctcccaggtgattgagaaaaaaataaaaaagggtattcagtaattgatacggaggctcctgtggaagcagagttggaaaaattgcctaataattggtctgctcaaatgcacgagctgtttgcactcagccaggccttaaagtacttacagaatcaaaaaagactatttcaatcctgactcaaagggctacctacaccctctctgaaatgaatttgcataagaacggttgtttatgggaatgcatcttgatggggcagctgggttgttatgaaatacttaggaacccagcccaggtctagtactcacccctgagcacaaaaacaatgttgggcaatttggtaaaggaccactagaatccagcagcctggacccctttctttgtggtcaagagaggtgggaaaagaggtgcaggactgctacatcagtgaacataactaatctgataagcagaggcctatgggtggttatgcaccctggaaaggaataagcattaagaacatagaggccgctctatgactaatgcttattggaaaatgaccaggggtgctggcatccctatgttcttttttcagatgggaaatgttccccccaaggcaaaaatgtccctaagatatattctggagaattggggccaattgaccctcagacactaagaaagaaatgacttatattcttctgcagtacaacctcaccatgatatcctcttcaaggggaaaaaacctggcctcctgagggaagtataaactataacaccatcttacagctagacctcttttgtaaaaaggaaggcaaatggagtgaagtgccatatgtgcaaactttcttttcattaagggacaacttgtgattatgtaaaaagtacaattatgtaaaaagccctacaggaagccctcagagtctatctccctaccccagtgtccccccgactccttccccaactaataaggacaccccttcaaccctaatggtccaaaaggagatatacaaaggggtaaacaatgagtcaaagagtgccaatattcccccattatgtccactccaagcagtgggaggaggagaatttggcccagccagtgtgtgtatacctttttctctctcagacttaaaacaagttaaaatagacctaggtaaattctcagataaccctgatggctatattgatgttttacaagggttaggacaagcctaacatctgacatggagagatataatgttactgctatatcagacactaaccacaaatgaaagaagtgccaccattactgcagcgtgagagcttggtgatctctggtatcttagtcaggtcaatgataggatgacaacagaggaaagagaatgattccccacaggccagcaggcagttcgcagtgcagaccctcattgggacatagaatcagaacatggagattggtgccacagacatttgctaacttgcatgctagaaggactaagaaaaactaggaaaaagcctatgaattattcaatgatgtccagtataacacagggaaaggaagaaaatcctactgcctttctggagagattaagggagacatggagaaagcatccctctctgtcacctgactctattgaaggccaactaatcttaaaggataagtttatcactcagtcagctgcagacattagaaaaaaacttcaaaagtccaccttgggcccgagcaaaacttagaaaccctattgaacttggcaacctcagttttttataatagagatcaggagagcagacagaatgggacaaacagaattacaaaaaaaaggccaccactttagtcatggccctcaagcaagcagactttggaggctctggaagagagaaaacctgggcaaatcaaatgcctaatagggcttgcttccagtgaggtctacaaggacactaaaaaagattatccaagtagaaataagccaacccctcatccatgccccttatgtcaagggaatcactggaaggccaactgccccaagggatgaaggtcctctgagtcagaagccactaaccagatgatccagcagcaggacggagtgttcctggggcaagtgccagcccatgccatcaccctcacagagccccaggtatgcttgaccattgagggccaggaggttaactgtctcctggacactggcacagccttctcagtcttactctcctgtcctggacaactgtcctccagatctgtcactatcagaggggtcctaggacagccagtcactagaaacttctcccagccactaagttgtgactggggaaatttactcttttcacatgcttttctaattatgcataaaagccccactcccttgttagggagagacattctagcaaaagcaagggcaattatacacctgaacataggagaaggaacacccatttgttgtcccctacttgaggaaggaataatcctgaagtctgggcaacagaaggacaatatggatgaacaaagaatgcccatcctgttcaagttaaactaaaggattccacctcttttccctaccaaaggcagtacccccttaaacccgaggcccaacaacaactccaaaagattgttaaggacctaaaagcccaaccatgcaatagcccctacaatactccaattttaggagtacagaaacccaacagacagtggaggttagtgcaagatcaacttcactccctagcagcagtagtccttcaaaatcaaagagctttagacttgctaaccaccgaaagagggggaatttgtttatttttaggggaacaatgctgttattatgttaatcaatccagaattgtcaccaagaaagttaaagaaatttgagatcaaatataatgtagagcagaggagcttcaaaacactggacctggggcctcctcagccaatggatgccctggattctccccttcttaggacctctagcagctataatattgttactcctctttggattctgtatctttaacctccttgttaagtttgtctcctccagaatcgaagctgtaaagctacaaatggttcttcaaatggagccccagatacagtccaaagttgatgacatcgaaggcactcctctcaaggaaatctcaactgcaagacccctactacaccccaattcagcaggaagcagttagagtggtcatcagccaatctccccaacagcacttgggttttcctgttgagagggggcactgagagacagaactagctggatttcctaggccaactaagaatccctaagcctagctgggaaggtgaccgcatccacctttaaacacagggcttgcaacttagctcacatctgaccaatcaggtagtaaagagagctcactaaaatgctaattaggcaaaaacaggaggtaaagacatagccaatcatctattgcttgagagcacagcgggagggacaatggtcaggatataaacccaggcattcgagctggtgactgctaccttctttgggtcctctccctttgtataggagctctgttttcactctattaaatcttgcaactgcaaaaaaaaaaaaaaaaaaaaagaaaaaaacaaaaacaaaacaaaaacagaaaaaaaaaattatctccaaaatatcatttactcccaaagaatgaactgcttcagttaagtcttcatctgttgtccaccatgttagatttccaacatataatgcaattctctttccagtatgtgtatagacaacattaggtgccactcctttacccatatcatcaccaacagttggtgggagagtatccatgtaatcccagtcttctgtggcatctccattatttgcagatggagatatgacacagtcatacaaatctatctggccatacccacgatattcagcttcctggtttaactcttcacccacatctcgtaaatgtctatgtggtccacgctgtctgccatcttccctcagcctcggccactgctgctgccgccaccaaataagtacatttttgatggtgacagagtaatatcaatgtctaaagttttggtctatctctcaaaattgagaagttgaccaaaagggagaaattgttaaattaattatgcctaaagctgccccctttcctgtttaactttggtcactaggttttttatacatagtaaactgaaatctaactgggtatataaatagaccaaccaattattgtacaaacctctgtgtttttgccaataaaagaacatcaagtgttcaaatcatgattaaataaggcaaatcccaacctgtaatcaatctggctgtttctgtatctcactttcattttctgtatgtcactttgcttttgctgtttataaatctattttcatcatgtggctgtgttagattctctctgagcctactctggatccacagcctacccaatttgcaaatcattccatgctcaattgatctctgttgctcacgtctgggagcactttggggggctgaggcaggtggatcacgaggtcaggaattcaagagcagcctgaccaacatggtggaaccctgtgtctactaaaactacaaaaatcagctgggtatggtggcgcatgcccataatccaggtactcaggaggctaaggcaagagaatcgcttgaactggggagacagaggttgccgtgagacaagatcacaccactgcactccagcctgggtgacaaagcaagactccatctttaaaaaaaaaaattaatgtatctaaaggttttttcttttaaaagatttcaaatattttctatgatgaaaactaataatgtgccattggactttgattttctaaactcatccctcagctatttctccaaattattttatgtctttacaaaatgcttctccagtttctttctttccttccttccctccttccctccctccctcccttctttctctctttctttcttttccttccttccttctttctttccttcttttgacagggactcactctgtcatccagtcttgattgcagtggtgtaactactcatagctcactgcagacttgaccttccaggtttaagctatcctcctgcctctgccacctaagtagctgggactataggcatgcaccaccatgggtggctaatttcttcatttttgtcatggaaacagaatcttactatgttgttcaggcagcactggaactcctgagctcacatcatctcccatctcatcctcccaaagtgctaaaaatacaggtgagagccaccatgtgcttctgcaatttttgtgaggattattcccaatgataaaaagtactctatgagcacaaatctaaaaggaatctgacttcttctgtagaagtgtcactctccaggatttcaagagtctagggcagggcagctactttagtagtgtgatctatggaggtgtatgggctttggagtcagataaagttgatcctgagtctcagcccagccacttagtagctgtaggtctgcacaagtttcttgatgtggaagagttctatataccacatatgtaaaaaaggtagaatattacaaattgtaaaatgattgcaaaatgacaacattttttcatcctacttgtatctatgcccatagccaggtgcttttacagctgtttccttaagatctggaatctgttttcaaaaccctatatctggctgcccttatttgctcaggtcagtagaaacctgtgaacatgacagtgggccagtttggggcccaggctcaaatggtattgactgcttctatttttcttttagaatgctgccatctccatgaataatgcccatgttagccagctggaaaataagataccatgaggaggagaagcaaggtgccgctgttgacaggcccagaagaagaaactcacccccagaagcagagctgtctagtcaacaagcagctgatgatacatgtctgaaggagctcagctgagactggaagaatggccccactcagctcggcctaaatggctgatcatttcaattatgaactaataagttttggatgatttgttatgctgcaatagctaactaatacatgcacccagtacagataggttgccaggattcagagacaggttgactaccagttggcttctaacagtggacaccctctaggtactgatttcttcccctgatttaaagtttgatgttttgtgagagaatttgggtaatgcagaaatacctgtagacatgtatgcatgtgattggtgcttagactcacatagtcccccacaccacaggagaaaacagataaatacagcctgaccattagggccaagaccaaatagcaaaatatgtttgcttttaatctattttctccatctctaaatactggagttcaagtgtgtggacagaactgaagacagctgtttttctcctgtagccccatcatcttttgttcactatctggtctctaaaagaaaggtgggcaacaggtgaccagcagttgcttattacctgtggctattttattcctactgcctatatgctcttaattttatactttattatctagaaaagtgtcatatgtatattggtgttgtgggccttatgctattctcttctctcagagttagagaatattttagagaatatttctgtgttaaaaattattggagaatttcagtcatttctattaatcagaaccaattctctttactctgtcattttattttaattcaaatgataaattctgctcatgaccatttggtaaatatatgtgtgtctgtgtgcttgcgtttttcaggagccattgtcatttagggatgtggccatagaattctctctggaggagtggcaatgcctggacagtgctcagcagggtttgtataggaaagtgatgttagagaactacagaaacctggtcttcttgggtgagaataactttaatacacaatttctaatataccctaaaggtttcctttctctttttttgtggaatgatttttggtaatttacgctttgcataaatgagtttctgatccattttttcaaaaaaatcttgagactttgtctgtgtggaaaagaaggtattcaagatgtctcatcttgacctgaactttccacattcctgagctggtctgtatccttcactctagattagtggtaattccagaaatgtagtggcataaaatattgttgcccatgtttttaggccaggcacggtggctcactcctgtaatcccagcactttgggaggccaaggtgggcagaccacgaggtcaggagtttgagaccagcctggccaacaaagtgaaaccttgtctctactaaaaatacaaaaattagccgggcatggtggcacatgcctgtagtcccagctactcatgagactgaggctggagaattcatttgaacccaggaggcagaggttgtagtgacccgagatcgtgccactgcactccagcctgggcaacagagcaaaactctgtcccactccgccccaaaaaaaaaagtatttatatatagttgcccgtattttaaaatctattcatcagcatcatgagtaccgggtagtgaaattaaggacctacaaatttaaaatattttctaaacatttagaaatttcattagtattttgagattaattttgggaatattctattacctcctctttactaagcatactactaggttggtaattggagaataagagaaagattcaagttattcatttctaataaagcaggtattgctgtcactaagccagacctggtcactgtctggagcaaggaaaagagcccgagaatataaagagacagatggtagccaaatccccaggtaggtgagagtgaacacaacagatgacacagatgagaggtccaaatgtcaaaaagaaagctggtccttaaaatgtgatttgggaagctgtgttccaaaggaaatagtttctgggatgtgtgagcttttttgttttttgggagtattttttgctgtgacataggggcatcttctctcttatgcttttaaattctttaaagattctgctttccctttggtgatcttccttcaagtgtacagtgagagccaaagtccttttcatggcatgtaaaagactgtacaatctccctgcttttccattatttggggggacacacagatatcagcataattttgggaaactctatgttaaactattttttagttttcctttttcatcatgtctgaaatgtgtgaaagtagaggtttctgttccattgttttgtttgttaatctttctgcacatttcatctgtttttaattactatattcttgaaatagagttaaattataaagtataatacccctctggtttgttcttttgcctcaagattgcttgggcttttcgaagtttattgcagtttcttgtaaattttagaattgtattttttattactgtgaaaaaaatgccactggaattttaataggaagttttttgaatctgtagattactttagataatatgacactttaacaatatttattctttcaatccatggacatgaaatattttaaaatttgtctcttcaataatttatttcattggtatcttacatcttttttgttttgttttgttttttgagaaggagtctcactcttttgccaggttggagtgcagtggtgcaatcttggctcactgcaacctctgcctcctgggttcaagcaatcttcctgcctcagcctcctgagtagctgggactacgggcgcatgtcaccacaccaagctaatgttttgtatttttagaagagacggagtttcaccatgttggccaggatggtcttgatctcttgaccttgtgatctgccccccttagcctcccaaagtgctgaaataacaagcataagccaccatgcctggcctatcttatatcttttattgtaaagattttttaccttcttggttaaatttgctctcagaaatttattattttaatgctattgtaaataagattattttctttattgtatcagatggtttaagtgtatggaacaataacttatacttgtatgttaattttatattttgctaatttactgagtgtatttattagtatagacaaatttcagtgcagtgtttatggtttttttatatataagatcatatgatccacaaacagtaactttttacttatttgtcttcaatttcagtggcttttcaaaaatgtttttgactcatgattctgccacttacttccagtcctacgtaaaaatagaagcattgacaataggcacaatatagttttgcattggtgtctgtgaatttgatagagcaaacacttcttcaagttgttttttttgttttgttttgtttttttgttttttttttgagacagcattttgctcttgttgcccaagctggagtgcagtgtcatgatcttggctcacagcaacctccgcctcccaggttcaagtgatgctctgtctccaaaaaaaaaaaaaaaaaggaaaattaatggttgtaaaaacacataacataaaatttaccatcttaaatcttttttttttcttttttgagacagaggctccctctgtcacccaggctggagtgcagtagcgcaatctcggctcactgcaacctcctcttcctgggttcaagcaattctcctgcctcagcctcctgagtagctgggattacaggcacccaccaccatgcctggctaattttttgtatttttaggagagacagggtttcaccatgttcgccaagctagtcttgaattcctgacctcaagtgatccttccaactcggcctcccaaagtgctggcattacagcatgggccaccgatcccagcctaccatcttaaatttctttaagtgtacatttcagggctagacctggtggtgcctcacaactgtaatcccaggatttcgggaggtcaagaaaggaggatcacttgagcccaaaagtttgaaatcagccagggtaatacagggagattccctctccacaaaattatttaaaaaattgccaggcatggtggtatgcacaagtggtttcagctacttgggaaatgaagagaagagaattacttgagcctgaaagtttgaggctgaagtgagccataattgtgccactgcactccagcttgggtgacagagtgataatgtctcaaaaaaaaaaaaaaaaagttttacagcccaggcacggtggctcattcctgtaatcccagcactttgggaggctgaggtgggcagaccacctgaggtcaggagttcaagaccagcctgaccaacatggtgaaaccccatctctactaaaaatacaagaattagctgggcctatgacaggtgcctgtaatcccagctactcgggaggctgaggcaggagaattgcttgaacccaggagccagaggttgcagtgagctgagattgccccattgcactccagcctgggtaagagtgaaacaccatctcaaaaaataataataataaaaataattgcattttagccatgttaagtatattcacattcttatgcaaaaaacttctagaaattttacatcttgtgaaactaaaactaaacacccattaagtaacaacaacccattttaccctctccccagcctttggcaaacacccttccactttctgttattctaaatgtgactatttaagatatctcatataagtagaatcatacagtgtccatcattttgtttctggcttatgtcaggcgatgtaatattctcaaagtttatcttaaaatgtgacaagattttcttctttaagactgaataggccaggtgtggtggctcacgcctgtaatcccagcagtttgggaggctgaggcgggcagatcatgagatcaggagatcgagaccatcctggctaacacggtgaaacccagtctctactaaaagtacaaaaaattagctgggcgaggtggctctcgcctgtagtcccagatactcgggaggctgaggcaggaaaatggcatgaaccaggggggcagagcctgcagtgagccgggatcgcaccactgcactccagcctgggtgacagagcgagactccttcttggaaaaaaaaaaaaagacctaataatattccattttatgtataggttacatttttgatgtgttcataaatctagagaaacccgggttgcctcagccttttgacttttgtgagtactggtacaataatcatagatgttcaaatatgtcttctaggtcttttgttgcatattttgaatatagattaatggaattgctgaatttaataataattatttttaattgagaaacgtaacattttaaaataatgactgcatctttgttttctaccaacaatcaacagaggtttcattttcattgcatcatcaacagatttggtgtctaaaaaatttatagcagccattgtaatggatgtgaggtgatttcatttttttcatttttatttttacatgtttctctacaaattgttaattttatgtgccatttcaaatggttttccccatttgtgtatcttttttttttttttgagacagagttttactcttatcacctgggctggagtacaatggcgcggcctcagctccctgaaacctccatctcccaggttcaaatgattctcctatctcagcctcctgagcagctggattacaggcatgagccaccacgcccatctaattttgtatttttagtcgagacagggtttcaccaccttggccaggctggtctcggactcctgacctcaggtgatccacccgccttggcctcccaaagtgctgggattacaggcatgaggccctgcacacgaccttgtgtatcttttagttcaattatttgttcatttctaaatcaagttattcaaatttattgttcagttttaagagttgtctctatattccattttttttttttttttttagatggagttttgctcttgttgcctagtctgagtgcaatggtgtgacctcagcttgatgcaacctccgcctccccattttaagtgattcacctgcctcggcctcccaagtatctgggattacaagcatgcgccaccatgcctagctaatattgtatttttagtcgaaatggggtttcaccacgttggtcaggctggtcttgaactcctgagctcagccttctccacctcggccttccaaagtgctgggattgaaccactgcacctggcccaaatattaactcttatcacatgtgacttgcaaatatttcccccatttcctatgaggcattttcattcaattgaatgtttttagtttctaatgtggagaaattttgaagtatagagtaaatctttctgtttttttgttgctgctcatgcatttaatgttgtatctaagaaaatggtgccaagacccatgtcatgacttttttctattttgttcaagagatttgttagttttttatgagtgtaagtattttattgaaaacattttttatatatggttcaaggaaattatccaactttatcagtgttgatatttggtttttaacattattgaaaagattatcttttctctattgtatgttcatggcagctttgtggaagatcatttaatcatatacacaagggttcatttctgaactctctattctgctctttcatctgtttatctgtctttgtatcagtaccatactgtttttgttattgtagcttttaatgttttaaaatcgggaagtataatgcctgtttgttcttttcatgggtgtttggttagttatagttcacaatcacatttaaaaattttaaagaatatttctgtaataactgctatttagatttttatagagatttcattgaatttgttcacctctgtaggttatattggcatcttaacaaaattaaaatttttgacccttgagcaggaatgtgttttattttaatttaatttaattttatttattagagacagtcttcctatggttccttggctagtttccagctcctgggctcaagcagttctcttgcctcagtcacccaaaatggtagtattacaggtgtgagccattgcactcggcccatgtgttttatttttagatattgttggattttccagctttacttttgcttttaattcctaggttttttttttttttttttttttttgagacagagttttgctcttgttgcccaggctggattgcaatggtgtggtctgcgctcaccacaacctctgcctcccaggttcaagcaattctcctgcctcagcttcccaagtagctgggattacaggcaagcaccataacgcccggctaattttgtatttttagtagagacacgatttctccatgttgaggctggtcttgaactcctgatctcaggtgatccgcctgcctcggcctcccgaagtgctgggattacagatgtgagccactgcgcccagcctttaattcctagttttattcagttttggtcagataccatgcagtgcatgattttggtcttcttaaatttatttgttgttgttttcagacaggatcatactccgtcacccaggctggagtatagtgtcataattttggctcactgcaacctcagcctccttgactcaagtgatctttacacctcagcctcctgagtagctgagactattgacatgcactgccatgcctggctaattttttgattatttctagggacagggtctcactatattactgacactggtcttatacttgtggtcccaagggatcctctcacttttgtcttccaaattgttgaaattatacatatcagccactacacccagctggtattctgtaataagacttgttatgtgttctaacagaatacatcaggtgcaaataagaatattgtgtattattttgcttttaactaaaaagttttgtacatgtctcttaagcctagtttgtctgtggtatggtttggatgtccatgttctgcaaacctcatgctgtaatgtaatcctcaatgttggatgtagaagctggtggggaggtgtttatatcatggggggcaaatttctcataaatgccttggcactattcttttgataatcagaaagtttacactccattaattcaaatgagagctgcttccttaaaagaacctggctttttctcttttttgtgatggagtttcactctgtactctaggctgcagtgcaatggcacaatcacagctcactgcaacctctgcctccctggttcaagtgattctcctgcctcagcctcccaagtagctgggattataggcactcatcaccatgcccagctaatttttgtagtttgttattagagatgggatttcaccatgttggtcaggctgatttcgaactcctgacttcatcgacttcccaaagttctgggattacaggtgtgagccacggtgcctggcctgaacctggctttttcacctcacacttgctctttttcttaccatgtcctgtttccattctctgcatatggctagccagttctcccagaaccatttgttaaatagggagttctttccttattgcttgtttttgtcaggtttttcaaagatcaggcagttgtagatatacagtcttatttctgagttctctattctgtttcatgggtctatgtgtctgtttttaccagtgccaggctgttttggttactacagccttgtagtatagtttgaagttggatagctgatgcctccagctttgttctttttgcctaagattgtcttggctatatggggcctttttgggttccatattaattttaaaatagttttctcattctccatcaatttttctttctttctttctttttttttgacatagtgtcactctatcacccaggctggactgcagtggcacaatctccgctcactgcaacctccacctcccaggtccaagtgattctcctgagtcagtttcctgagtagctgggatcacaggcttgcagcactacacctggctaatttttgtatttttagcagagatggggtttcaccatgttggttaggatggtcctaacctcagctaatctgccctcgttggcctcccaaagtgctggcattacaggcgagagccaatgtgcctggcctgcattgatgtttatcagagatgttggttttaaggttttgttgttgttgtttttatatctctgccaggttgggtatcagaatgatactgatcttataaaatgagttaaggaggagtttctccttttctttcatttaaatagtttcagaagaaatggtaccagcccttctttgtacctctggtagaattcagctgtaaatccgtctggttctgggcttttttttgtttggtagcctatttattactgtctcaatttcagaacctgttgttggtctattcagggattcaacttcttcctggttcagtcttgggagggtatatgtgtccagtaatttatccatttcttctagattttccagtttatgtgcatagaggtgtttatagtattttctgatgattgtatttttaattttttttttgacacaaagtctcactcttggcccccaggctggagtatgatggcacaatctcagttcactgcaacctctgcctcctgggttcaagtgattgtccttccttggccccccgagtagctgggattacaggtgcctgccaccacacccggcaaattttttttttttttttgtatttttagtggaggcggggtttcactttgttggccaggctggtctagaactcctgacctcaggtgatccacccacctcggcctcccaaagtgctgggattacaggcatgatccaccacacccagccctgatgattgtatttctataaggtcagtgctgatacctgctttatcgttttttactgtgtctatttctttcttctcttttctttattaatctagctagtggtctattttattttattttttaaacagctcctggattcattgatttttttgaaaggtttttttgtgtctctgtctcctatggttccactctgatcctggttattttttgtcttctgctggctttggggtttgtttgctcttggttctctttttcttttagttgtgatgttagggtgtcaatttgaggtctttctagctttttgatgtgggtatttagtgctattttaccccccttaacactgctttagctgcattccagagaatttggtttcaaataattttttgatttctgacaattatttactcagaagttattcaggagtatgttttccatgcaattgtgtagttttgagttagtttccatgcagtcgtatggttttgagtgagtttctttctcttgagttctaatttgattgcactgtggtctgagaaactgttatgatttcagttctttggaatctgctaaggagtgttttacttccaattatataatcaattttagagtaagtgcaatgtggcaattagaagaatgtgtattgtgttgtttttggctggtgagttctgtaaatatctatcaggtccacttgacctacagctgagttaagtcctgaatatccttgttatttttctttcccaatgatctgtctaatattggcagtggggtgttaaagtttcccactgtcattgtttgggagtctaagtctcttcgtaggtatctatgttttataaatctgggtgctggctgggtgtggtggctcatacctgtaatgtcagcactttgggaggccaaggcaggcagatgccctgaggtcaggagtttgagaccagcctagccaacatggtgaaatgctgtctctattaaaaatacaaaaattagctgggcatagtcatgggcacctgtaatcccagctattcaggaagctgaggcaggagaattgcttgaacctgcgaagtggagtttgcagtgagccaagattgtgccattgacctctagtgtgggtgacagagtgaaattccatctcaaaaaataaatcaataaatgaaaacaaatcttagtgctccttgaattgatccctttaccattatgtagtgtccttccttgtcttttttgatctttattggtttaaagtctgttttgtcagaaactactattgcaacccctgcttttttctgcttttatttgctttgtaaattgttctccctttctttattttgaggctatgggtgtctttgcatgtgagatgggtctcttgaatacagcacaccagtgggtcttgactctaaccagcttgccattctgtgtcttttaattggggcatttagcccatttaaatttaaggttaatattgttatgtgtgaatttgatcctgttctcatggtgctagctggttattttgcagacttgttgatgtagttgtttcatgatgtcattggtctttgtacttcagtgtgttttgcatttgctggtagtggtttcttcttttcatatttagtgcttctttcaggagctcttgcaaggcaggtctagtggtgatgaattccttcagcatttgtttgtctgaaaatgatttcatttctccttcacttatgaagcttacttttactgggtattctgggttagaaattcattcttttaagaatgctgaatattggcccccaattgacaccctggcttgtagggtgtcttcttagaggtccattttatagtaggtgacctggccttccctttggctgctcttaccattttttcctgaagtctaaccttgaagaatctgataattatgtgtcttgaggttgatcttctcatggagtatcttactggggttctctggattttctgaatttgaatgttggcctgtctttttaggttggaaaagttcttctggatgatatcctgaagtatgttttccaacttggttacattctttccatctctttagagtactgcaatcagttgtaagtggtctttttacataatccaacagttctcagagattttttcattcctttttatttttattttttcaatcttatctgccttatttcagcaagatagccttcaagctctgaaattcttctccctgcttgatctactcagttattgatacttgtgattacattgtgaagttctcatgttgtgttattcagttgcatcaggtcatttatgttcctctctaaactggttattcgggttaacagctcctgtaatgtttttcgtggttcttagcttctttgcattggcttagaacatgcttcattacctcaccgaagctgattattacccaccttctgaagcctacttctctcaatttatccatctcagcctgatcccagttctgtcctcttgctggagacatgttttgattatttggaggagtagagacactctggctttttgagttttgaacatttttttattgattattctcatcatcatgagtttatctagctttggtctttgaggctgctgacgtttggatggggtttttgtggggacatttttgttgatgctgctgtggttgctttctgtttttcttttaacagtcaggcccctcttctgtagggccgctgtgatttgcttgggatccacttcagatcctatttgcctgggtttctcccacacctggaggtgtcaccagtggagtgtgtagaacagcagagagaactgcctgctccttcatctgtaagctttttcccagatgggcactgagctgatgacagtgggaatacttctttataagttgtcttacaatgcctgttgggggggtggtcctcactcagtcaggatgcacaggattcaggaaccacttaacaaggcactctggctgcttcttggtgaagggggtgtgcttcactgggagaaattccatacatctggactgcccagatttttcagagccagcagggggaaagactaagtctgctgatctgcagaaaccacttcattgttacacttttatgtgtttcttgtagatatgtcttttctcatttcttgttttactgccttaatttttgttttaattttattgtgacatgctttattttttattttgttttgcatactttccataagtataatgtaatcttgaaatacaatgtaaccatattgaagaacagattacataaaacatcttaaagttaaaactatgtattttaatctcatcacacttcaattaaatacaaaacttatactgttatattttccagtttgttattaatattaaaaaccatattatcttacatcatgtatctattaacagatttatacagatttatatcttgttttttatatctgtagaagaactttaagggttttatgcagcatcattttgatagtaaaaaattctatatgtgtctgtatttacatttaatagagaacttcatatttatatatgttttatgatgctgtctagtatcattttgtttttcaacataatggactcattttagcatttctttttgtttgtatgcagagtctcactatgtttctctggctgatcttgaactactggtctcaagtgatctatctaccttgtcttcctaaagctgtagaattacaggcctgagccactgtgcctggctaccatttaacattttatgtaggactctggtagttgtaataaatgccctgaacttttattttggaaagtctttatttttatcttgtttttgaagtaaaataattttgaattaagtattagttagaaattcttttataacatcaaaatttgggaagttctcagtcttttttgtcttcaaataagctctgtattactttttccctatattcttctaagattcctttcatgaatatattgatctacttgatggtgtccaatacattttacattccatattttaattttgttttgcaatgttatatttttgtgttatatattttaaggtatgccacttcacaccatttacttgtgttttggtgttttattttatattataattgtgtatgacagtgtttaactctgtgcaatttaagacagtctagcaaaatcaatataaatcagccagaagtctactgccaatataattacctctgtgtttgtttacctctataaatgtcatctctgtttattttatcacttgtatatttgttttgtaggtttgttttgaatggtcgtttagtcttggctaggtgaccagttataaaattctcctaatttcagtatctgttgtgaatctacattacttctgtgtgggagaaatactttgggatttgaagataaaattgaaactattatatctttatatattgttcatttttacttgtcaaaaacacataaaatattatctttttttttttcttgagacagcatctctgttgcccaggctggggtgcagttgtggcatcttggctcactgcaacctccgtctcctgggttcaagcgattcttttgcctcagcctcctgagtagctgggattacaggcatgcgacaccacaccctgctaatttttgtattgttagtagagatggggtttcaccgtgttggccaggctggtatccaactcctgacctcgtgatccacccacctggcctcccaaagtgctgggattacaggtgtgagtcatcacacctggcccattatcaaatatttttaaataatctgtttagtcatattaattatagtgataatattacgcaacatacacctagaatgtttttatcttgcaaatctaaatctcagtgtacattaaacaacaaccaatttttctgattttctggcactttgcaaacaccactttgttttctttttctaagagtgtaactgcctcatatgtcttatacaatctctgtctcattgtggctagctcattttattttgcataatgtcatcaagctttatttttagagttgttagactatttcctgctttttaaatcctgggtgatattccagtatttttatgtcacaaattatatgtattggataatttggtgacagaaagttgcattgctgccgggcgcagtggctcacatctgtaatcccagcactttgagaggctgaggcaggaagataacaagtcaatagatcgagaccatccaggccaacatggtgaaaccccgtctctactaaaaatacaaaaaattagctgggcatggtggcacacacctgttttcccagctacttgggaggctgaggcaggagaattgcttgaacctgggaggtggaggttgcagtgagccaagtgtcactgcactccagcctgtgcaacagtgcaagactcagtctcaaaacaaacaaacaaacaaaaacaatagaaagaaatttgcattgcttttacttattggctttcagtaaaaatgctgcaataattatgggtatgaaaataactcttcatatgaccatatatgtgaaactttatataggtgctgcattctattttattagcctactttttacccattatactcataccaaattgttttaattctgtagctttgtaatgtgttttgaaatcaggaactataatgccttcattttctttttttgaagactcttgggtactttattgtctcttgacattttatatatttttggagttgtttctatttcctcaaaaatgcaatgagaaattttttaaaacattgcattaaatctgtagattacattgagaagtatggatgttttcaaaatatcaattatttctacctttaaacaggagcatgctcaagagtgtgttgtttaatttccatgtatttgtgaatttttagttctttttctattattgttttatactcattccattttgttcatataatccatacaatttcagtcttagcaaatgcattaagacttcctttttggcctaacatatggtctaccaaggagaatgttgtatgagcaattgagaagcatgtgtatcctgatattgttgaggagtcttctctatatatctgttagaaataattgttttatactgccttcaagtcctctcttcactaacaaatattctgttttgttttatttttattatggaaagtagggtatggaaatgtcctactataattatattgctgtctaggtgtttcttccattctgtcaatgtttgctttatatatttggaaacttaatgtgagatacacacacacacacacacacacatacatttgacttaggttatcagtaaatgaatctattattttttaatgtcttttgtctctttgcaattttgacttttagtacattttataaaatatgaaagtttttcacttaagatatagcttatgtcatattattttgacctcttctctcatttggttaatatttacttgcaatatgtatatccatcttgccactttcagttttttttatcagtagatctcagcttactcttgtagaaaggcaaattggatctcagtttttaaaatatttaaataaatctctttattaaaagtatgtttcttgattgcaaagttaaagatatatatttaaataattttctgaaacaggaagacatactaatgttattttattgttttatttgattcttatatcttggtcactcattttctctttgtctttgtgtctttttagttttatattgatatgtttcttttacttatttcttaatttgttttgtgcatctatacacatatgttctttgaggtaccttggggattacataaacctctaaaagataaaacagtatatttcaatctggtaaaaaggaacttcatttgcatgcacaatttttttctcattacatcttccctcaaatttgtcattgattttgctaattatatctttttatgttgtatatttattaacagatgtttataatgatttctgtgattttctctttcaactttcagataataattaaaaatgttttctgcaccattattataatgcaaagaaattccattttggtgtatgtgcatatacttagaagtaaaaatatatatgtgcatataatctttcccagaaaataaatgtagttttatatgattatgtgttgcttttgttgaattatgttattttcagaagaagcaactgctttcagcactttttatatgtagggtttatggagttccaatatacttttcagaattttgttatttttgaaagtttttttctttttatttggcaggacagatttgctgatggtattatgctgtcttgatcgctgtatttttcaggagtttgactttatcacacatttcccttctggtctgcaaaatttttgttgacaattcactggctgtctcataagactatgcttgcaaatgacgcatcacttttatcttgcagctcccaaggttctcttcttgtctgtgacttttgaaattgtgcttatatatgtgtttgttataaatatctttgtgtgtttcctagtttgtttgttgagcttcaacatattgccttattttgtatacattgtaacccttgattgaaatttggacattaaaaaaggctacctgtcacaatctttataatgtagctttgtcctggcatagtctgaacaatcgtcttggttagagattctgggagtctctcaaacatgttcttagaatgtgtcttgtctgaaatgttctttattttttagttaaaggaatttattcatgtttcttcttaatagtagtcacgtgctacacctgttttctctgtgtggtacagtagtctctctggtgctgtaacatttacctttggtctcagcaaacttaaactgtcactccaaagtataccaccatttctttcagcattatatttcaagagagacacaaaccagttttggaaagctcctagaagcaagtaacaaagatgaatgtgccagtattttacttgtcgttaaaacgttggcaatttacttctaaagacactatgttatattggggagcagaaagagctgtgttgggtaaatatagcagactttcacttccaggtggctctttgcgttgttctcaccatgggcacttcatacacttagctcatttgtaaatttttttcagatgtaatttggttggtatgtttttgttacatttacatgtctaaaggaatgagggcctttggtattttcctatgccatcttgtttatgtagtttgtataataagttagatttgaaaactttgtctgtgtctagcaagtaatttgttatttttatttctttcagttatatgttctcattttgcccaagacctttgggcagagcaggacatgaaagattcttttcaagaagcgattctgaaaaaatatggaaaatgtggacatgacaatttacagttacaaaaaggctataaaagtgtggatgagtgtaaggtacacaaagaagataacaaactaaacctgtgtttgataactaccaagagcaatatatttcaatgtgatccatatgaaaaagtctttcatacattttcaaattgaaatagacataagataagacatactagaaagaaacctttcaaatgtaaaaaatgtgaaaaatcattttgcatgcttttacacctaactcaacataaaagatttcatattacagagaattcctaccaatgtgaagattgtggcaaaaccttcaactgcttctcaattcttactgaacacaggagaattcatactggagagaaatcctacaaatgtgaagaatgtgagaaagaatttaaacggtcctcacaccttactacacataagataattcatactggagagaaaccgtacagatgtgaagaatgtgggaaagcctttaaccggtgttcacacctcactacacatagaagaattcatattggagagaaaccctacaaatgtgaagaatgtggcaaagcttttcaccaatcctcaaccctaactgcccataagataactcatgctggagaggagccctacaaatgtgaagaatgtggcaaagcttttgcaagattctcataccttaagaaccataagataagtcatactggagataaattctacaaatgtgaagaatgtggcaaagtctttaaccactcctcaactcctactacacataagagaattcatactggagagaaaccatacaaatgtgaaaaatgtggcaaagcctttaactagtcctcaactcttactaaacataaaaaaattcatgctagagagaacccctgttagtgtgaagaatatggcaaagcctttaataagttctcaattcttaacagatataagataattcatactagagataaattctataaaccagaaagatgtgacagtgcttttgaaaacacctcaaacttttctaaacataaaagaaatcatagtgttgagaaatcctagaaatgtgaagaatgtgataaagttttaagtggttgtcacacttgattgtaggtaagataagttatactggagaaaacttctacatgtgtgaacagtgtgacaaaacttttaaccagtgctcacaccttacttcacaggaaagcatttatacttgagaaatattgtataaatataaagactgtgaaaaagccattaatacatgctcacatcttactcaacatcagagagttcatacttaataaaaacattataagtgcaactactgtcaaaatatctttaagaaaatggaagcctctaaagtaaagaagattattttgaagaagaacattgtagtagggttgtaatatgtttacttgtgtcacagatcttattgtacacattttgtattagaggaaacctcagaagcaattgctcaaactttgtttaatatcagggaatttatattgaaaaaaaaaccctgcaaatgtaataaatttggaaaaatactttttcaaaaactacagcttagaaaacaccacagagttcatactaaaacatatttttgcagatgcagtaaaaatttaaagaaattttaatacaaaattaagtctatgtaaatatcagagaatttacagtagaaatatataaggcactgacacttcagatattatactaaatcacagtgctcatgatagaaaataatctaaaactaaagttgatagaaaaattattcatatataagtttaaaagaattttttgcagaattataattacattcaaagtatgcttaacttttggaaaacatagattttttgaaaagtgaataatgatgtaattcaattctcaaattatttcctgctgtttcttcattcctatttacatgtgagagcatgtgatgaattgttgctgcatccaagatatgagagattcttttttattaggtgagcattatttataaactttgttatgaaaatgtaaggacattaaaatgtaagatgcatgatgaaaatctaagtgaagagacctttgtggttaacttataatattgagtaatgtgtgagttaagtgttcagtcatattcttctgtattatgagaagaaaacatttttaatttcataagtaaattaaaatttagtatattgtactaattatacttttatataaaatgcagtatattttgaaaatttcagattatatgtgatgttaatatattcaacatctttaacattttaaatactgttgtgcattcagtgaagtgttatgtaacaaacattaattcccccttactcaaggttgtacataaaatatggtaataatatactatttgttaacataatggattaacttctctagtacttttgccagtggctttgactgcaaataagttaaacaatattatttctttaaattaaatttttgtttctattttatttaattttttttgagagggagtcttgctctgtcacccagtctggagtgcagtggcacaatctcagctcactgcaaccttgcctcctgggttcaagcaattcttctgcctcgatctcccaagtagctgggattacaggcacccgccaccacacccagctaatttttgtattttagtagagacagggtttcactatgcaggtcaagctggtctcaaactcctgacctcaaatgatccacacgtctcggcctcccaaagtgctgggattacaggtgtgagtcaccatgcccagccaaatttttattttatttaaatttatttttcttaattatttggggtacataatatgagtatatattcatgcaatatatggcatattttgatacaagaatacactatataataatcacaccagggtaaatgaggtatccatcacctctagtatttatcttttttttgttgttgagacagagtcttgctgtgctgcccaggctagagggtagtggtgcaagcttggctcactgcaacctccacctcctgggttcaaatgattcttctgcctcagcctcctgagtagctgggtttacaggcatgcaccaccatgcccagctaatttttgtgtttttagtagagacagggtttcaccttgttggtcaggctggtctcaaactcctgaactcatgatctgcctgccttggcctcccaaagtgctgggattacaggtgtgagccaccgtgcccggcttagcatttatcctttgtataacaaacaatccaattgtatgcttttagttatttaaagatgtacatttaaattgttattgattacagtgtaatttttatggtcaaaataaaagttatgtagaaatatgaataaaatccatacatttctgagtcctgaataaatatttttaaagttttctgatatttattttttgaacatgtttcctgtctgcccacaaacacatgcagacgtttagttttgatttacatagagttcaatatatgttagtctaaagataaaccttaggtgtaagaaaattatagagtaagtgagtttgtgtaagtatgaatttgtaactattttcagaagaagacaatattgaacaaggcaaatcatttcaacaagatgactactagaaaactaaaaaccttaaaaatgctgaaagcaagtatattctctgctttgtattgaatttattactgtacaatcgatggcttttggttctgaatctccccatgcaaattttgtttatacttgtctggtactcatgatagacccctaattactttgtatcttttcgatatatatattttatagtttatgaagtattcattatgtgagcttgtctgtgtttataagaataattttataaaatttagtagtgcatacaaaaattttaaatgtaattccataattagtgtattaagttacattttatttagttagaacactccattttgtttttaattggagaactctatagccctttagttatttttcttttcactttttataattggcataagtaaatttatttattgagttaatttgttcagataagtactagggaagctttataagtcatgaggatgtttttatatttaaatgtagcaggccgggcgcagtggctcacaccggtaatcccagcactttgggaggccgaggctggcggatcatgaggtcaggagatcgagaccatcctggctaacacggtgaaaccccgtctctgctaaaaaatagaaaaactttgcagggcgtggtggcggacgcctgtagtcccagctactggggaggctgaggcaagagaatggcgtgaacccaggaggcggagcttgcagtgaggtgaggtcgcgccactgcactccagcctggacgacagagcgagagtccggctcaaaaaaaaataaaaaataaaaataaatgtagcaaacatacatgacagttcttgccttgtaacagatgctccgaagtaagccataagtattcctgctaaagttagtttgtaacttcaagttagagatggaaaacatcagtggtgaagaattcagattgattcttcatgtggagaggacatattttccaggctgcaatgctgaatcttgctgaatttaaagagaagttctgcatcttttatttcttaattatcttcagatttgtctgtatttattatgtgtatcccagctatgtatgcagcacagcccttctcctttttctgtgttacggcttcagttttctcagtgttgtcttaatgccgtttcatttcacatggtactttgtaaattttgatgagaaagttcgcctttttttttttttttttttttgcgtcagagtctcgctctgtcgccaaggctggagtgcagtggcataatgtcggctcactgcaacctccgctttctaggttcaagcaattatcctgcctcagcctcccaagtagctgggattacaggcgcctgccaccacacctggctgatttttttttttttttttttttgtagttttagtagagactgggtttcaccatgttggccaggctggttttacacatcaggatcacctgatgtgatccacctgcctcggcctcccaaagtgctggaattacaggcgtgagcccctgcacccggctgaaagttggtattttttaatgcactgaaaaattggttttaactgaagagtttggttatcaatataactttcagatcagttaagataaataaaaacatacactgtccacgggtgagaggattaaatcagcatggtttttctttgtaaaaccaaaaaaaaaaaaaaattggattcttacacaaactgtggcaaatataaaatttgcttcaaaacatagaaattttaaaaagagttatggtaagtgaacatggtggcacctgcgccaccatgctcagctaattttttattttttttttagtagagacgagttttcaccatgttggccaggctggtcttgaactcctgacctcaggtgatctgcccacctcagcctccccaattgataggattataggtgggagccaccgcacctggcagagtttcttacatatttttgatattaactccttgtcacatgtataatttgcaaatattttctctcattttttagttgtctcgtcctgttgattgtatcatattctgtgcagcagctttttaatttgaagtcatctgactcatctatttttccttttatttcctaagattttgaggttaaattttaaaaaactggccaggcacggtggttcacgtctgtaattccagcactttgagaggctgaggcaggcggatcacctaatgtcaggagtttgagaccagcctggccaacatggtgaaacctcgtctctactaaaaatacaaaaattagccaggcgctgtggcgggtgcctgtaatcccagctactcgggaggctgaggcagaagaatcacttgaactcgggaggcggaggttgcagtgagccgagatcatgccactgcaccccagcctggtcgacagtgagactccgtctcaaaacaaaacaaaaaaccaacttactaatgccctgaacaaatttttttttagatggctccttttttttttattatactttaagttttagggtacatgtgcacattgtgcaggttagttacatatgtatacatgtgccatgctggtgcgctgcacccactaactcgtcatctagcattaggtatatctcccaatgctatccctcccccctccccccaccccacaacagtccccagagtgtgatattccccttcctgtgtccatatgatctcattgttcaattcccatctatgagtgagaatatgcggtgtttggttttttgttcttgcgatagtttactgagaatgatgatttccaatttcatccatgtccctacaaaggacatgaactcatattttttatggctgcatagtattccatggtgtatatgtgccacattttcttaatccagtctatcattgttggacatttgggttggttccaagtctttgctatcgtgaataatgccgcaataaacatacgtgtgcatgtgtctttatatcagcatgatttatagttctttgggtacatacccagtatccctgaacaattttatggggttttcattctatttttctgtagtagtttcagagtttcaggtcttacatttatttattattattactattttgagatggagtctcactcttgttgcccaggctggagtgcaatggcacgcgatctcaactcactgcaaccttagcctcctgggttcaagtgattcttctgcctcagcctctctcccaagtaggtggtattacaggcacatgcaaccattttgtatttttagtaggaaattttgtatttttctacaccagctagttttgtatttttagtagaaacagggtttcactaccttggccaggctggtcgcaaacaactgacctcaggtaatctgcccgcctccacctcccaaaatgctgggattacaggcgtgagccaccaggttcatcctaagccttacatttaagtgtctaatttacttttagttgatttttatatatggtgtgagatgagggtctcattttatttctctgcctgtggatataaagttatctcaacaccatttattgaagatactgttcttttggctcacgcctgtaatcccagcactttggcaggacaaggcgggtggatcaggaggtcaggagatcaagaccatcctggccaacatggtgaaacctgtctctactaaaatacaaaaaattatccaggtgtgggcgcctgtagtcctagctactaaggaggctgaggcaggggaatcacttgaacctgggaggtgggggttgcagtggcaagattgtgccactgcactccagcctggcgacagaacaagactccatcttaaaaaaagaaaaaaaaaaaagaaaagaaaagaaattgtcatctttattccaaatcagttagctttaaatacatggatatatttctggtctcttttttactgctccattggcctatgtgtctgtttttattcaagtaccgtactgctttagttactatagcactgtagaatatttgaaaggtatggtaataccttcatgtttttttcttgattgctttggctattcagggtctttcgtggtaccatatacattttctatgatgtatgccactggtattttgatagaggttgcattatacctgtagatcattttgtgtaatacagaaatttattaatggaattcaataaatgagtaatatttcatttgtgcattacttaatttattcaatgttatttacagtgtaatgtaaggtgtttcaactttttggttaagtttatttcaaagtatactacagttattgagatggaattattttttaatttcattttgagatagttgttagtgtacataaatgctactgacttttggatgttgcttttgtattctgaaagcttaataaatgtgtttattctaatattttatagtaaattcttaggcttttctgtatttcaggttatgtacagcaataaaagataattatacagggataatgtaatttcttcctaacctagatgcctttgattttattctctaatttctttgtcatggactttcagaactatgtttagtaagactgattagaatggacatctttgtcttgttttagcttttagagtaaaagcttataatatttcactgtttagtatgttgttagctgtgcatttttttgttatatgtggcatttattgactgaggtgcatttgttctatacctaattttttcagagatttatcataagggaatgtcaacttttgtcaaacttttattctgcttctgttcttttctttttgttctctgcatctatttaaatattagggatgtgaaatcacaactaatcctacataaatacaaaaaatcatgagagactactatgaacccctctatgccggcaaactagaaaatttggaaaaaatatgctgggcaaggtggctcacacctgtaatccaagcactttgggaggctgagatgggcagatcacctgaggtcaggagttcgagaccagcctggccaatatggtgaaaactcatctctactaaaagtacaaaaaataaaaataaaaaaaattaaccagaaatgttgtcacacacctgtaatcccagctactcaggagactgaggcaggagaatcacttgaactcaggaggcagaaattgcagtgagagtgagcttagatcgcaccactgcactccagcctgggtgacagggtgagactctgtctcaaaaaaataaaaaaaaattggagaaaataaataaactcctcgatacaaacagctttccaagactgaaccagaaataaacagatctcgaacagagcaaaagtgtataaaatatataatgaaactgaattagtaataaactaccaaccataaaagccctggatcatatgaaatcacatccaaattttaccccacatacaaagacattctgctgaatgtactccaaaaaatcaaggtaagattccaccctaactcactatataaaatcagtactatctagtgaacaaaatctagtgaaggcacaactaaaaaagaaaactccaggccgatatttttcataaacattaaaacaaaaatcctgcatgaaatactggcaagctgagttcataagcaaatgagaaagttattttgccacaaccgtgtgatttttattccacatatgcaaggatgtttcatcatatgcaagttataagtgcgattcaccatgtaaaaataattaaaagccaaaaattataagattaacacaatagatgcagaaaaagcattgaagaaaatccaatattcattcatgaaaatattctcaacaaacaaggcattgatgaaacatacctcaaagtgataagagccatctatgacaaatcctcagccaacattatactgaaaaggcaatagctgcatgcattctccattagaataaaaataagacaagaatacccactctaacactcctattcaacataattctagaagtcttagtcagagcaatccaacaaactaaagaaataaaaagcatctaaacagaaaaaaaggaagttaaattatcttacactgatgatataatgctctacctagaaaactttacagatttctggaagtatataattttaaaatataaattatggctgttaaatatcttcatttctatacctcttttggctaatattaaggttgattgaaaatataagttgttagaaaatttcttgaattaaggccattagttaattattaacataatttgagacataatagcaatgaaaatcagcattgattaatgaaacaaatattatctagcccctggtaatcattttctctcccacccaatgtgaaagcactatctttgtgtcatctctcccagttctaagaaagaggcttctgatcaaattgatcagcatacaaatttgtaaagtttaacttttagtctaaaaatttattatcagcaaagtttatcttttgatatgtaatattttattctatttaaattcttcagaaaagtgaaactgacacagcttgcatttaactttttttgtaagttaaaaatgcttaagaaactttttttatagaaactaaaacaaaataattttacatttttggagaacatttctcaagtacttcaagttatctttctctgacagtagatatatatttttctctattgctgtaatagagctttgactgtcctttgtggccgactctgtcatttttattctattttgttgtgtggtgtttatgttatgcatcttacattgtaaaagttgtagtccatgcaggcaatgtaataatttttttttttttttttgagatggagtcctgctctgtcacccaagatagaccgcggtggtgcaatcttggctcacggcaacctctgcctcccaggttcaagtgattctcctgcctcagcctcctgagtagctgggattacatgtgcatgccatcatgcctaatttttgtacttttagtagagacggggtttcactatgttggtcaggctggtctcgaactcctgatctcatgatctgcctgcttctgcctcccaaagtgctgagatttcaggtgtgagcccccacgccccacctgttttgtttttgagatgaagtcttgatctgtttcccaggctggggtgcagtgatgcaatctcagctcatggcagcttctgccactcgggttcaagtgattctcctgcctcagcctcctgagtagctgggattacaggttcccaccaccacacccagctaatttttgtatttttagtagagacagggttttgccatgttagccaggctggtcttgaactcttgaccttaggtgatgtgcctgccttgacctcacaaagtgctgggattacaagcttgagccgccacacccagcagcaatgtaattttcaaacaattgaccagcctttttccatgtcaaactctctgcttaatcagtcctttattttcactcttcaaaggcattttaactgtgtttttttgttttgttttgtttttgatggactttcattcttattgcccaggctgaagtgcaatggcatgatctcagctcaccacgactgctgcttcctgagttcaagcaattttcctgcctcagcctcctaagtagctgggactgcaggcaggtgccaccacatctggctagttttgtatttttagtagagatggggtttctccatgttggtcaggctggtctcgaactcccaacctcagatgatctgcccaccttggcctcccaaagtgcggggattacaggcatgagctaccgtgcctggccatatacatgcttttatgacaaatcattttgtgatcatttaaagttttaatttagcagttgccaagaccagctcagctggggagaccctaacccagtggcactagaggaattaaagacactcacagaaatatagaggtgtgaagtgggaaatcaggggtctcacagccttcagagctgagagccctgaacagagatttacccagatatttattaacagcaaaccagtcattagcattgtttctatagacattaaattaactaaaagtatcccttatgggaaatgaagggatgggctgaattaaaggaatatgttgggctagttaactgcagcaggagcatgtccttaaggcctaaatcgctcatgctattgtttatggcttaagaatgcccttaagtggttttctgccctgagcaggccaggtgttccttgccctcattcccataagcccacaaccttccagcgcgggcgttagggccattatgaacatgttacagtgctgcagagattttgtttatggccagtcttggggccagtttatagccagattttagggggcttgctcccaacatgcccccttctctgatttgcaaatcaataaaaacaagggcagctttctcacagtgagctacttctcacaggagtcgggatctacatctgcagactatacaaaggcaaacaacacagattaaaactacagccatcattgaaatcagagagcttccaagtgtttttatccattttaatgggttactagctgctaatttgtctgcacctcctttaaacactccagttcctggcattaaggtcaggtgtgcctgggatgctttaaatatttgttcttttaattttaaatccttatgttaagctcctagagcaggccatatcatttgaggttgaggtgccactataccgtcatggttccagataataggaacttttgccatacttattattatatctaccatctgaccattttgttcagatcacctgaacatagtgtgaccgtggcatgcagactgagaggtgcaattcaagctaaacatccccttaggggatcaattaataatgattccataggaaacattctgcagcacctctgcctgttctgcaaagcaatcttcctaaataagtacgttcattttttctactgggtccaatcctgtttacaaataggtttttgagggcagtatgcctcaattataggagcagatttattatggtaaatacggagatcagaaagcatgtgtaactgtgtcatagagtgattgcatccaggcattattaccagcccttattgaaggaatactcacagcaatggtgataaccactatcatagctaccattaagttattcattgtgactgattgtcctgctttcctcaggttttcttccaccatctgtgacagcttcttgatctgtccccaggtgggtggctgtgtttgacgggtgttgcttgtgacagttggggtcctcctcagtgtcagcctggacatggctgcaactggcgggtcctcaggatcctcccagaatctcttcctcagcatctggctcatgataaggtttcaggtgtcttgatggtatccaaatcagttgttgattttggcctggagaaatacaagtataacctctaccccaagttattattttacctatttcccaactttttgtagtcggatctctccaccaaatcagatgttctgttcctgtctttgcagctggtttctgtagatgctggtcagctgctgataacatctggcctttgggaaggttcaaaaaatttaaagttaataatgctagattcagttgtatctgcagtgttccatattctctatttttccctttctacttttgtgactgctgttttagggaaagattcattctttccactatggcttgtccttgagaattgtatgggatgacagtaatgtgattaatattccacatagagaaaaatgtagctagagtttggctagtatagcctggggcattatctgttttaatagaagctggaatgcccatcactgtgaaacactgcaaaagatgacatttaacacaagcagaaaactctcctgtttggcatgtagcccagacaaagtgagaaaatgtgtccacacatacatgtacataagctagtctcccaaacgagggaacatgtgtcacatccatttgccaaatagagttaggttccagtcctcgaggattaactcctcctgtaaaagatgaggaatataccatttggcaagttgggcactgctggataatagctttagcttctttccaggtgatgctgtatctgcatttgagaccagaggcattaaaatgggttaaattgtgaaagtgtctagcattagatattgcagtagcaactaggcaatcagccatttgattcccttcagtcaaaggtcctggaagaggtgtatgagctctaatgtgagtgatgtaaaaagggtgcattctactcctaactgctgtttgcaattgggtaaataaagtcatcagttgttcatctgtatgaaacagtagctgaccattttcaattaactgtgtggaaggaaccatgtatgaagaatcagaaatcacattaataggcatatcaaaagtagtcaatacctcaattatagctacaagctctgctttttgagccagaataagaagctttgctattactagacccatctgtaaaaacattatcagcaccttcaattggtttacatttagttattttaggaacaatccaattagttaatttcaaaaactgaaacagcttcattttaggaaaatgattatcaagaatacccacaaagtcagctaaatgggtttgccaagtaagactatttataaaagcttgctatatttgtgcctttgtgagagggacaatactttttccaggatcatatccatgtaatttaacaatctgagttctcccaatccctatcataatagcaatttgatctaaataaggagttagagtccgtgaattagtatgtggaaggaaaagtcactctactaagtcctgttcttggacaataacaccagtatgtgaatgctgagttgaaaaaattagcaaatccagagtcttctctggatctattctatttatctgagctttacggacttgcttctcaatcagttgtaactctccctcagtctcctttgttaaatgctgtgggctagtgagactaggatttcctctaaggatagaaaacagattactcatggcataggtaggaatgcttagagcaggtctatccaattaatatcccctaataatttttgtaagtcatttaacgtttttagttgatccctatgtatggttactttctgtgccacaatggtagtgtcatttactaaggtccccaagtaggagtaaggagtagcagtctgaattttgtcaggagctttaattaaacaagtgggagaaattgaattttgcaagtgattataacattggagtaatatttctcaagtaggggcagcacaaaatataccatccacatagtgaataatgtaacactgtggaaattttttatgagtatgttcaattgcttgcccaacatacatctggcaaattgttgcactgtttaacatgccctttggcaacactttcccatgataacgctcagcaggctgcaggttgtttactgcaggaattgcaaatgcaaacccttcacagtcttgttcagctaaagggatagtaaagatacagtcttttaaatctatgactactaaaggccaattttttggaattatagcaggagaaggcaatcctggctgtaatgttcccataggttgcataactgaattgatggctcttaagtcagttaacattctccatttacctgattttttcttaattacaaaaactggagaattccaaggggaaaatattggagctatgtgcacattttctaattgtttagtaattaaaatctctaaagcctccagtttttctttatttagcagccatcattctatccaaattggcttatctgttaaccattttaaaggtataggctctggaggcttaacaatggccaccatcaaatattatttcctaatctttgttgggaactttgtttttccacttgaagtggttctttcaaaccttgcaaatttttttctagtcccataccagggacataccccatttcatgcactgtatgttgactttgagggctatataattgttctggaattagaaattgtgctccccattgttgtaataaatctcttccccataaatttataagtacagaagttataattggttgaatagtcccagattgtccatcgggcccctcacaatgcaaaatttaactactttgatatacttcagtggctttaccaactccaactatgttaaattgagcaggttgaattggccacgtggacagccagtgctgtagagaaatgattgaaatgtctgctcctgtatctgccaaacctttaaatttctttccttgaatagttatttcacaggtaggatgtttatcagtaatttgatttacccaaaaagctgctttgccttgtttatttctgcttccaaatcctcctgtttgtttaatttcactttttcccattcccacatatggcacaatcaggagctgtgctatgcactctcttggctctgctttccagaaaacagaggtagatataacaatttgaatttccccattgtaatctgaatccatgactcctgtatgtatttgtacttttaaacttaaactagaccttcctaaaagtaatcctattgtccctgctggcaagggtccacagactcctgttgggaccctttgcaggggttccccaggcagaaggctcacagcttttctgcagcataaatctactgcagcactactggctgtggtgggggacagccattgtacaggggtgagggaatggcctgagctggaaatgccccggtttagaacagggcctgggacgggaccctcatggcgtttccagaaattgggttcccatctttatcaaacttagaatgacattgattagcccaatgttttccttttggacttatttcaggatcagcagttttcttttttcccctatctggtggcccgactcggtgattttttctaaattcttttttagtatgaccatgcttcccacagttaaaacaagctccaggaaatggagtatttcctttatccactctcagccctgccattgcctgtgccaacaaggtagctttatgcagattaccccctataccatcacaggccttgacataatcaactaaatgtgctttccctcagataggttcacagagcagcctggcaatcgggattagcattgtcaaatgctaataattgcaacactataacctgaccagctgaatctgcaatcatctttataagagactcctgtaactgagctataaaatcaatgtatggttcttttggtccctgttttatagcactaaaggaagggtattgttccccacctgaagtggtcttttcccaagctctaatgcacactcctctaagctgttctatgacatcatcctgcatgaccagttgtgcatctaaactagcccaaccgccaacccccaaaagttggtctgagttatattaatttgaagttgggcctgggcactgtgagcagcctgaatggaagcttcatctgcccaccaagttttcaattgtaagaagtgagcaggagttagacaagctcgagtaagagcatcccagtcagtaagaatcatctgactggaaacagtaacattctttaatagtcccattacaaaaggagaacttggtccatactgatttataacttgttttaattctttgagtaatttcaaaggaaaaggctcaaatgtagctgtaatatttccctgttgatctgggggttgtgttctaatggggaactgccaaggctctaaatcaccctctcgtctagcttgctgaattcctgcctgaatagaactaagagcggtcgctcgaggtgctgctcgaacagtcactggggcaactagttttcacccagtgtcctctggaaaagaaagatctgaaggttctttttcttcaaaataataatgagggggtgcagaagggtagggatgaacctctccttcctttgccactttagctttagctggcaaataaacctggtctgtaacctctactgttactttgctatactctcattcctcctcctcatcattgtgaaaaagttccaaggtaaaatgaaccagaccccatacctgtcccattgttaccctgacacttctgagctccccttcttactcaccatggggattgctttaagagtactcgggtgtcctccagctagttttccattccaaccattgctccggtgaccctttgacctggattgaagcccccacaaatggacgccacttgccgagaccagcttggtcagggagaccctaacccagtgccactagaggaattaaagacacacacagaaatatagaggtgtgaagtgggaaatcaggggtctcacagccttcagagctgaaagccctgaacagagattcacccacgtatttattaacagcaagccagtcattagcattgtttctatagacattaaattaactaaaagtattccttatggcaaactaagggctgggctgaattaaaggaatatgttgggcgagttaactggagcaggagcatgtccttaaggcctaaatcgctcatgctattgtttatggcttaagaatgcctttaagtggttttctgccctgagcaggccaggtgttccttgccctcattcccgtaagcccacaaccttccagggtgtgtgttagggccattatgaacatgttacagtgctgcagagcttttatttatggccagccttggggccagtttatggccagattttggggggcttgctcccaacagcagtgttgtctgggttttaaatgtgaatggtgacatatcagagaagaaataataaagaatacaaaacaaagcatgatagtgttgatggctgtgtgagacctcgattcttctcactttcaaaaaatttaaacaagagacacaaaacaatgaagatgcagcatagagtgatttattgcaaagtagaaatactattttaaaagttaggtgaagaatagccagcatttgctgagaaagaaggaattcagggcaggctgccaaaagaatgagacagcaaagactggaactagggagactccatttatgggagtcttacataattaattataaggaggtgggaagaggtgttagtagtaagcatgttctgggtggtccttttggtgcacagacacagtggctgtacatgcttatatgtcacatatctccttaacatcttaaatcttcacacacgtgtgtgttttttactattataatgagtaaaaggtcagttagaggataagtaaaatcaaaatgtgcatgctctctacagtgcaatttccctactgaagagagctttgcttgaatggctgaaatacagtgtaaatgctggggtttattgtgttgacaatatgcagtcaccgtgcaatcaccatggctgccacatcccgaggacatcgtcactttcttgactacctagcttgcctcaatagtacttggcttgatttattccaaattatcaactctaagactcagatttagctgttatgtcaacattgtcaacagtgggaaaattaaaatttttaaatcaaacatatatgagcttgttgggtcactagctgtgtatccaagagaaattattttacatcccaggagcttcaatcttaattattaatataaaacactatttcccctaaggctactttaattcatgaatggtagctataacacttgaaagtctcatctaaatattaaatatttaagagtaagaataaaatcatttttatttcaaagatatgataagtgagtgggtgtattttgtcatatttaatgtatttttcttttctaaaaaatgccataataattgtattttttccagaataacagactatggatatttaagttatgactttgccaatttttacatatggtaaaactgctactgttaaatttaggttaaattttaaacccactgttttttagcttgtgtggtttttggctcatttggggaacaaaatatattagacgttgactgtttggggtaacttgggttcatttctgctgtctgttattacatctggggatttagaaacaactaggattaaaataagtttggtttggaatcaagcaacagaaaatcccaaaaggactaaggaaaatagctaatggatactgcctttcagtgagatttatacacaaacagagtttaatgagattcatgaaattattgcaagttttttaaatttagaaaccaattacctacaacatattaggcacttgtcttaatttgtctatggcaaccctatcttggggaagctgatattacagaaaaggatattgctactgtaataatatttggaacaaatgtttatgtgcttatgaacagtcccctctaataatctttagatacatgtcattctggctcaatccttttggcatgactgtaattccagagactccttcccaccgaagcgaagccatggagttttcagctgcttatgcttattttcagttagtaagcttcatagctgacgtcattatattggggtccccaggaatccctgagccttagagctgaccatcctacctcatccttcttgcttctcatggtctgttgttgagtccctctcactccatatttgagccttcatgagacttcagtttggagaaaccagagaaatgggttgccatatgtattgagttgacaatcagaatccgtttgaggataaagactttacatttattattcatggtacaaagcagtatttttaagatgtgaacatgttttagtcaaattaaatataaataaattttttttgttatgacatagtctcactctgccacccaggctggagggcagtggcgcgatctcagctcactgcaccctctgactcctgagttcaagggattctcctgcctcagcctcctgagtagctgggattacaggcatgagccaccatgcccagctaatttttgtatttttagtagagatggtgtttcaccatttgttcaggttggtctcgaactcctgacctcgtgatccacccacctcagcctcccaaagtgctgggattacaggtgtgagccccggcacctggccaaatataaataattttatcagtatgccaatgtgattaaaataattttatcaagttcaccaaatgttctgctttagactctcccaacacaaagatcaatatgtatgcactggtgaatattagtttttttggtgtatggttttgtttgtttacatttttaaagattttttctacttcatgctgatgttaaactacacaaagcttaccaaaagcactcttttaccacatttttctactaaaagtttaaatacttaaattttgaaagtgacgttctggattacccttttccttgtgatggagtctgcgtttattagtcctacattgcagtttctctttatgtggtgcaaggctacaaaaatgccatccagttgattttgatttattaggtaacagtagaatctgttttctcaggcagtagcatgagaattcttgatatgttacctttagacgtactgaaagcaactggataaatttgctgaaatttgtctttattcttaagggcactagaggctaagtcatagcaacacacaatatagttcagtccaactttttttgtctaaaattttgtggagctgcatccacctgtatgatgtaactcagtaacagcttctttatactaagccagaactcattttacctgctggttttgttttaaatgtatgagctgtattatatcacatttaaatcagtaaatgaaatgaattcagaggttatggaaagaaaagtacaggcacactaaaaatgaatttgaatctggcagctgacactgattaacaggttgagcagattggactagacctgcattcctgtaaacaatattgaaagggagaattgaaaacatcttcagcaacacgataggcctatgagatttgaaaagtaaatcgatttgtttacccatcttcagtcaatactaggttaaactggaaaattttgaacacattattccaaaaatgaaattagtaaattattctcagacttaatatgattaaaacaagacttctgggtatttgaaagcaccaaattattgatgaaagatatccattttgaacagattcttgatcttatatatatattactactaagtaaaacctaatactgatagctttaatatatgaaatatttgtgaatgtctatcactgtagtgaaaaatcaagacattatttaaatctaaattttgattaaaatatttgatattttaattgagtgccagtattcatatagtatggcaaagcacccagttctttagtattctgcaattttataaaataagccagaatttgtggagacatttgttaaaaaaacaaaaacgaaaacaatcttttctaaaaaaaatctagacatcagaaaatagagatactaatgttacactatataaacagtttgctgaaccctacagtaatctgtgaagtttttttgtgtgcgtacaacaatcttagattacctaaaacaaaacgaagtttctttcttctgcttaacatacaaaagtccaaaatatatccggacagacaggaactgtggctgccactttaaaaaaaacaaacatttcaccacgatacactgttttgtgtatgaacagatggaaaaccaacctttgaagttttcaaatcataagcagaagcattgtgcctctaagccttaaatatataaaacaaatacacacagtttattcttcttaatttaaaatatactgttctttgaacatcaaacgacattagactatcaaaaacctcataagtcatacaagtgtcaactgtattttcaaaattataagaacttagaacaagtaaactaaacagctacagctacagtttagttaaaaataataataataaactactctgtatttgcccttgtgatgagaatcacctttattcattttggaacaaacaggaaatgctgcagtggtaacttgctgagtggcgactgcgatgagatttactgtcctagggatgatgggatccagtggaccagaatcgtcagcaccttaccatggtcactgctgtcctttcactctgtcattcatttatcagacttcttcatcaattccgtctctatcgttgtgtgaacggttttgtactgctttagcatctgcctttgattgctgctaattttctttgttcatctttctggtccatcttggtggctgctttgctgttcctctttgaggagttcgcgcagcttcaccctcaggtgttccaacagtccgtccatctggctcaagctgtcgggcatttttcctggttcttctgttcctggcgtctgagatttgtcagcagggcctggttttcagggaccacggctaccgcctccttctgcccgcggggcggctcctgcacctctggcgggcaccggttccagccacggtttagccgagaacagggggaaccgcagcagcagatggagcgcccacgtccggggtcgcctcggctctaacccttggtcatggctcagcttggtgcgcagaaacccgacgtcaatcagagcattttgcgcagctgggcgagctttcctcggcatgcggggcagttcccccatcatctttatgctgccacctccgctttcatcagagagttacacaggatggtgcaggggcccggagacaccgtggaagagtccaggggagtgaggaggggctgggccgggcagcctcaggcccagcgcatgatggcgccccctcacgcctgagcagaaatcagccactgccacctcggagaggacagaggggcccaggcttccccagccagcctcgctctgcaccagcagaggaaaaaattattttctaaaaataaataaataaataaataaacaaataaataagtaagtatggagaagaacttgcagttctgacccaatcaaattttcattctttttctttcattttttttttggccgttttctcttaaattgtgctctcctgaagtcagatttcatgttccatcctcacgtggcaatttaaatgtaattataatggtcccaaatttagaaactaaaaatgttaatgtattttacccatgagtgctaggttaacattaaattttcaatagtgctttctcaattctacacttcattattttctatttgatcctgttaactaaactatagaaaataaaaataataaaggtttgatttgcatagtttcacagtttacaaagaatatgtattcattcctttaaccaataaatgtgtgttgagcacacatgatatgccatcattttggtagccttagaaaataaaatagagaaaggaaagttttgatctctactctcatgaaactttcagtctaacttcataaaatcctcatgcattcctgagaagtggatacctctgaagtttcctataaacctcctaccccaatctgacttcaggagagcacaatctaagaggaaaaagcaaaacaaaaagaaaaaaagatgaaaatgtgattgagtaagatatgcaagttctattccataattttgttaggaaatagttttcatctctactagagcagagggaggctggctgggaagcctgggcttctctgtcctccctgcagtggtagtggttgatctgatctctgctcaggtgtgaggggcaccaccatgcactgggcctgaggctgcctggcccagctcatcctcactcccccggactcttccgtggtcactccgtgcccctgtgtcatcctgtgcatccttctgatggtagaggaggtggtagcaggaagctggtgggagggcctggctccataaactgaggagggttcacccagctatgggaaatgctctggatgaccttggatttctatgcagttagctggacctcatcccagggttacagccagggcatccctgagctgggtgacaccagatgtggatgctctggctgctgctattgtttctgtagaatcagcacccaccagaagtgcaagagccaccctgcaggtggaacgaggtggtagccatggttcctgaaaaccacaccctgctgacaaatctcagatgccacaaacagaagaacggagagaaactgcccaagagcttgagccaaatgaacggactgctggagcagctcagggtgaggccacctgcacttctcaatctggtacagcaaagcaaccatcagagatggacaagaataataaaaagtcaaagaaaattagcagaagttaaaggcagatgctaaagcactgcaaaatcattcatgccacaatagaaatgaagttcatgaggagttaatacaggagttcttaagaaattattttaggcagttaaagagggtaaaagagttcttactggaattttccttttataaaaagcagcccccaaaccattttattcctaacagaaagcagcctaaaaactcaatccgcaagcttataagcaagctagagggttgcatatgtaaatggaaatgcctgtactaaaagccaggtatatttcaacatggcaactttcccctcttttctttttcaccatgagtgcagatgtcatggtgacagccaggtagtagccacgtttgcataataaaaggctacggtcggggagccagtcttttcactggctatgtaaatggcatgcctgttcaaccaataccctgggccctatgtaaatcaatcactgcctcctcaagcctctctacaaaatcaatcgtgttctgccccaaacccagaaactctactgggcaacctgctttctcaggatgatgtagctttctctctctcttctttttgtctattaaactttctgctcctcaacccattcctcttgtgtgtttgtgtcataaattttcctggcatgagaaaacaaaccccaggtatttaccccagacaatgcagccatttcatttggaggcttgtccaggatcagaacaaaatatagaatcattggaatggtgagtatggagtgatcatcaaatctgtcctttaatttcaaggctctcagtctccatgttaaaatgctttggaccagtttcctttcacagagaatctaaccattgtatgaggctgggagaagtcctggaacaactgaggttttctggccagggcacatcctggtgttattcaaggcttctggactgaatccagcctttgacagctcatctacgtgttggtaaaggatctccaactatcttgtcacaaaatttttcttctttcctgtctgtggttactgtgtcttctatcctatctgtgtatgcaatgtgcaggaagtcttggtaaatcctgcagtactggggagcacgtggtatttccaagccaacagtgcaacgaagtggcaatagaaatcctcttcatgaggcacattgtcagtcctttgccatgcactgtagtttcccaactctcctccctttttgcactgctaaaaatcaggctctatgcctcttctgtgaatgggaaaggtctgccttcaacaattaaaagaaaaatgtcagccaggcacggtggttcatgcctgtaatcccagtactttgggatgctgtgcccggtgggtcatgaggtcaggatttcaagaccagcctggcccagatgttgaaaccccatctctactaaaaatacaaaaattagccagtcgcagtggtgggtgcctgtattcccaggcacttggaagactgaggcaggagaatcatttgaaccctagagacggaggttgcagtgagctgagatcatgccactgcactctagcctgggtgacagagcaagaatccatgtcaagccatccccatcaagctaccaatgactttcttcacagaattggaaaaaactactttaaagttcatatggaaccaaaatggagcccgcatcaccaagtcaatcctaagccaaaagaacaaagctggaggcatcacgctacctgacctcaaactatactacaaggctacagtaaccaaaacagcatggtactggtaccaaaacagagatatagatcaatggaacagaacagagacctcagaaataatgctgcatatctacaactatctgatctttgacaaacctgagaaaaacaagcaatggggaaaggattccctatttaataaatggtgctgggaaaactggctagccatatgtagaaagctgaaactggatcccttccttacaccttatacaaaaattaattcaagatggattaaagacttaaatgttagacctaaaaccataaaaaccctagaagaaaacctaggcattaccattcaggacataggcatgggcaaggacttcatgtctaaaacaccaaaagcaatggcaacaaaagccaaaattgacaaatgggatctaattaaactcaagagcttctgcacagcaaaagaaactaccatcagagtgaacaggcaatctacaaaatgggagaaaattttcgcaacctactcatctgaaaaagggctaatatccagaatctataatgaactcaaacaaatttacaagaaaaaacaaacaaccccatcaaaaagtgggcgaaggatatgaacagatgcttctcaaaagaagacatttatgcagccaaaagacacatgaagaaatgctcatcatcactggccatcagagaaatgcaaatcaaaaccacaatgagataccatctcacaccagttagaatggcaatcattaaaaagtcaggaaacaacaggtgctggagaggatgtggagaaataggaacacttttacactgttggtgggactgtaaactagttcaacccttgtggaagtcagtgcagcaattcctcagggatctagaactagaaatgccatttgacccagccatcccattactgggtatatacccaaaggactataaatcatgctgctataaggacacatgcacacatatgtttattgcggcattattcacgatagcaaagacttggaaccaacccaaatgtccaacaatgatagcctggattaagaaaatgtggcacatatgcaccatggaatactatgcagccataaaaaatgatgagttcatgtcctttgtagggacatggatgaaattggaaatcatcattctcagtaaaccatcgcaaggacaaaaaaccaaacaccgcatgttctcactcataggtgggaattgaacaatgagaacacatggacacaggaaggggaacatcacattctggggactgctgtggggtggggggaggggggagggatagcattaggagatatacctaatgctaaatgatgagttaatgggtgcagtacaccaggatggcacatgtatacatatgtaactagcacattgtgcacatgtaccctaaaacttaaagtataataataataaaataaaaaataaaaaaaagaatccatgtcaaaaaaaaaaaagaaaaagaaaaagaaaaatatcctccataaccaaattttgttccaatgctatcccattagcaaataaataaatcaataaataaaagccgttattctgtctccaattagaagagtacttaattagtaaggcaattttaagtccagaagttaattggaactgttttctaagggaaaatgttttagcatgggccgtaatagcaggatatagagctcaaaccagcatacttcctccattaaggaggaaggtgtaaccattgcctacatgctaccattacacagtttctccagagatcctttctttggggtgccaggcagatcacacaagtttagaaagtcaaagggtagtcatagtggataactaaggctgtgtgggtaattgttgttaaatcccatcacttcattcatccagttccatggcttggagggccatacctataaccatgggtggcacatttaacatggtgctgggacccaggaacaaaggagaaaaaacagtcagggagatgcttcaactgttttttcctccaccctgggtcacatcaaaaggagggagactaaaagaatgcttttattctcacttattttacttttttttttccttgagatacagtctcactctgttggccaggctggagtgcagtggcttgatcttgactcactgcagcctctgcctcctgggttcaagcgattctcctgcttcagcctctcaagtaactgggattacaggcacgtgccaccatgcccagctaatttttgtatttttagtagagatggggtttcaccatgttggccaggctggtctcaatctcctgacctcaagtgatctgcctgccttggcctcccaaattgctgggattacaggcatgagccaccatgcccagcctattctcaattctttttctagatgggtaacagaccaacttcagcaactctctggagtgtactctgaaacaccagaactcctttaacctcaggactttgaagagaaaagtgactttattttatttatttattttttattttttgcatggggcatggtatttatactaaacttttgcaagtgtcataagattgacccaggttttttttgtttgtttgttttgacattgagtttcacttttgttgcccaggctggagtgcaatggtgtgatctcgcctgactgcaacctctgcctcccaggttcaagtgattctcttccttggcctcctgagtagctgggattacaggaacccacatccacacccagctaatttttgtatttttagtagagatggggtttcaccatgttgaccaggctggtcttgaactcctgacctcaggagatctacccaccttggccttccaaagtgctgggattacaggcatgaggcaccgtgcctggctcaacccatgtttttttaatagtcatatcaggcaggctcatagagaataactcccccaaattagaaagcaacttctggtggaaccatctaagagtgtcccttatttggggccacctcaactttccttctcataacaagaccttaggcaagtaaaggaagacaggctgattttctgacaaccccaataggtatatagaagcatttctgaatttaactcaggtgtttcacctcacatgaaaggatgttatgctgcttctaaaacaaaccccaaccacagctgaaaagcaggcagttctgcaggcagcagaggattttggagatgagcaacaaatctcctataatacgccaaaaaggaaaaaagggagatagggaaagtgaagaaatagcagaaacaccatttccaataggaagtgaagcagttcctcttgacaacccttggaaccccaatagctctgcagatgaatggaaaaggaaatactttttttttttttaagatagagtcttgctctgttgcccacttgctggagtgcagtggcccaatcttggttcactgcaacctccacctcctgggttcaagccaattctcctgcctcagcctcccaggtagctgggattacaggtgtgtgggaggacacccagctgatttttgtcctttcagtagagatggagtttcatcatgttggccaggctggtctcgaactcctgacctcaggtgatccacccacctcggcctcccaaagtgctggggttacaggtatgaaccactgcgcctggcagaaacactttttaatatgcatataagagggcctacaaataactctcaaggccaaacctctcaattattctaaactgtctatgattgaccaaaagccagatgagaatcctgcagcctttatggaaaggctgagagaagcactaacaaagcacacctccttattccctgattcagtcgtcagacagcttattctaaagaacaagtttattacacagacagctattgatacagaaggaaacaacagaaacaagctataggaccagatagcaccttagagaacctcctgaaggtgaccactttgttcttttataatagggaccaggaggaggctcaagagaaagagagaaaagtcaggaggataaagctctagtagctgctttggaagcttgcaaagtccaggatccctgaggtgcatctgctagttgccattggtgtggtaagtcagggcattttaagaaggaatgcccaaacagcaagaagaagccatctcgaccctgtccagcatgtgatgaaggccactggaaatcaaactgcctccagagacagaggtcactgggtttacaactaaattacctctcgaatccaggcctcccctcttcccatagcatgactgtaaaggggcatctcaggaaaaactgtaatatttttctcaatctcttagttgcagttaggagcacttgttatttacgtatgcctccaagccattgtcacggtagctgtactagtcagaaaagcctctaaccctaggaaataacttaactgtttacaacccacgtaatgtggcagaattactgtcttctaggtggagcccttagctaacaaccaaccagtatagcaataaatacataggccaggataagcagtagtcactgtaaataatgtctctctccagacacaagtgctcaattagctggactaacagctcttacaagagcacttgaattaagcaagggaaaggtagctaacatttccactgactccaagcatgttttcttagttctccatgctcatgctgccatttaaaaggaaagacattttcttaccactaatggatcttctataaaatatcaccaggaaattaacaggttattatcctcagttttccttccatgagaaatggcagtgatgcattataagggacatcaaaatgaacaaataaatagccaaaggaaataggttagctaagcaggcaactaagtcagtggcaaggaagccccaaggcatcaatatacttcaagtccttttaatctaggaaggccctataagagaaattaaacctcagtatttttcgcagaaataaaataggccacttttttttttctttgagatggagtctcactcttttcatccgggcaggagtgcagtggcatgatctcggctcactgcaacgtccacctcccaggttcaagagattctcgttactcagcctcccaagtagctggaattacaggtgcccgcgaccatgcctggctgatatttgtatttttattagagatagggtttcaccatgttggccaggctggtctcaaactccttacctcaggtgatccaccctcctcggcctccaaaagtgctgggattacaggcatgaacctctgtgcccagccaaaataagccatttcttgagggcatactttccatccctcaggatggctacagtcaggggatggcaaactccatttgccagcctccagccaatggaaagtcattaaaatcctgcaccaagattttcacttaggaacttccaacagtaattaacacaactagaaaaagtccaacctcaggaaatagaaccatctctatttaacccagatttggtattagtgaaaactctcccttctctgcttccctaagccaagctaggaagggccctgcactgttcttctccctcagcagtaaaagttacaggtatcaagttctgaatacatgacactcaaatcaaagcctgaagagctgagggagcaacccctgatggcccagaggaacgtcctcaatatcaatgtgaaaaaatagaagaacttaagctgaaaaccataaaagataagtgaggtctactcatcttactcagtctcatttactcctcactaaataattttttaaatttttgcccttttctctcaaaatttactttaatatcttaaaatattagaacatttaaaaatgcatacatgcagggagattttaattatacatgggtttgcatttgtaatttcatagaaccccaaaggaaaatgttatttcttggcaagtaaaattttaaacaaaaattattgctgggcatggtggctcagatttgtaatcccagcactttgggaggctgagttgggtagatcacctgaggttgggagttcgagaccagcctaaccaacatgaagaaaccctgtctctactaaaaatacaaaattagctaggcgtggtgtcgcatgcctgtaatctcagctactcgggaggctgaggcaggagaatcacttgaacccaggaggtggaggttgtggtgagctgagatcacaccattgcattccagcctgggcaataagagcgaaactctgtctcaaaaaaaaaaaattatctattatgcaactcttgcacgaattgttatactcactccactatttgcagaactatacactttggcacccgtaatgtgtaattctgattgcaaaattctaattgctataatacttggccgagttatcatacttataacagtattaataattgcaggatttagtgaaggttgttttgcttaattattatccttgtatcagaggtaatagctacagacaaaagtaagcatgaaagttttacttcactgagcttgataggacttttcattaaatattggtaatatgggctgggtgcagtggctcatgcctgtaatcccagcactttgggaggctgaggcgggcggatcacctgaggtcaggagtttgagacaagcctggctaacatggtgaaacccattgtggcaggcacctgtaatccaagctacttgggagtctgaggcaggagaatcacttgaacccaggaggtggaggttgcagtgagctgagattgtactgagtgagttgtagagaaatgccacactttgagactaattgaggagtccttttattgccggcgaccaagagatggctagtgctcaaagttctcttggccctgaagaaggggctagattttgttttatattgtggtctaaataggggagggggagtttagctgaagcaatttttacagaagtagaacaggcaaaaagttaaaaaattaattggttacagaagcagttacagaaaaataaacagttccaggtgcaggggcttaaactatcacaaagagataaatgcaggggttttaggggccatccactgagcatgtccccaggagctgctggttcagcttgcctcaataccttattagtaagtgcattcctggatgtgcttggagtcagcttgcactagttatgcccttacgggagggaggcaaaggggctgtaagtgaaggaactaaaatggagtctgtctggctctctcagttaagagagacaattaggttaaaacaaggtagggtatcacattccccactcgtgttttggggaatcaaataattgattccttggttataacaagggggtatgttgggttctatgatacataagtttggtagaagttatgtgctgctttataaagttaagaaaccagtttaatatatgaggcccgaagactaaacctaacaggaagaggagaaggggtcctgccaatccagtaattaggatagttagccatggattccagttaaaggtgcttttgtaccagggggtgttactttctcattcctgttggcatctatctagatttttttgaacttttgggggtgtatcttttacgactctagactgattggcatagaaacaactctctcccagagctgcgcataaccctccttgggagagaaatagtagatctaagcctcagcagttttgaagggctgcttcagctagagactctacctgggtatgcagtatatttctggctgattggagattgcttaaatctgcatctacttgttgggacagggacattagtccagtttccccttgaataagggcagctgtgctgatggctgctgatccagctatgctaaggctggccagaaggggcacaaggagtggggcagctcagcaaaacctggaatgtaattcagggggagcaatgagaagttgtccctctggcccactgtacacatagacctgggggagcacatgaaccaacactcacaggagaggccccggttaagtcccactgatgcagcaagtgaggtcagaagtgcaggccagccaggtattgttgggtgcctggtaggagactgaggtgtttaaggtagtaagtagagaatgattacaggtagcctgaaaggcagaagcagacaagttatacccagagctaattagacaggaggtgttctttgacacttctcctagtgtaagggcatggggctgtgtatgacaagaaagagagttaactttgaacatggctttattcctaacccaacataccatgggggtttggccttcaggcacaaccagcaatcttgggctagtttaggctggatgatatttaggaggtgatgtaccccatccagaatggatatcaggctggattggagatgttgttgttgtaactgagatctgggaacaaggagtggtggtgggatagttaaattgaccctgtctgggtgtctttggaacatagggtcacctaaatcagttaaaggcctggttgacttaggagggctctatgggaccaggacctttttttggatggtgaacatagttccaacatcaaatcctgagatacaaagccttaatccccatgacatgccataataccattgagctgaattagggttacagacagttatagtgagagggctacaattttttatagtacacggtctaggacgggaattgtgagttatggaaagggttgaggaccaggttgatcctccagggtaagtggctagggttacacacgaccagtgagggcagaaaaactgaaaagaatctcaacaactagagtcagggtgattttcaagacagaggtaaaagtcaacgccttggagtcctttttttgcacctttagagctcccacctccggtctagcttcctgtgtgtctgaatcctgcagcaaggttgatgttccccactcctgcgactggcagattgcactgttcttcatgggtacaggcaggctctgggaacaaagcacataaatcgactgcaaaagagacttccttggaggttcctgccttccaagtagtgtttgaaaactcacatcctgttgtgaaagacgtgaggagaaaagagtaggatggagcagacggcataataggcagaaacaaacaaaagaggtaaataaaaaggattaatttgatggctttactcaacttaggtgcagttttaaggggactggcccaggcttggggacccatgtttcctgctgggctttgttggctttcttgatgtcagagtgatgaatccaagcatggataccatccacctttagagccgttggcgtggtgagaatgacagtatgaggtcccttccaggcaggagtgagtccttctttctggaactttttaacatacaccaagtaacccggttggaaagagtggcagggtccagtctggcaggaaccggattggaatgtgctcaccagaaaagtggctggatgatgtctcatacctgttggagagactgcaagtactgtaacaaattagcttgtgagatttctgctaaatggttatctcttagcttaggcaagctagtgcaccccttttatacatgatttcaaaaggtgaaaacccagcccggtaaggggtgcatcttactctaagaagggctaaaagaaggagccttacccaattttcacctgtctctaggattaatttagtaagagtgttttttagggtgtggtttatgcattctacctgtccagagctctggggtcgataggcgaaatggagtttccattgaatgtttaatggcttgctgaccgataagctatggacgaggtgaaggctggtccattatcagaccccatggcaacaggcagcccatgtcgagggatgattctattgagtaaaagcctaactaccatggtggcagtttcatttctgtggcaaatgcctcagtccatccagaaaaaatgtctactagcaccaggaggtatttataccctgtccggtgtggttttatttctgtaaagtcaattttctacttttctcctggtgagcttccctggaggccgtggcctgggctaggcttgggacctcatctggcatttacctgagcacaagccatacaccagagagctgcttggttagttaagtcctgaaggtgggggatcttgaaatggctctttagaagctgggccagttttattcttcccaaacaggtggtagaatgcagatgattgattaaagtttccccaaaggcttgggggcataaagattctggaatcaggaagaatccaccaaccttcctgatttttactggcctgaagatctgaagctagtttttcttccactggggagtattctggttggtctggcaagtcagtttgtggaaaggacactgtggacagcagggttaaaggggtgactgggagcagagctgcctcttgagctgcagagtctgctctttggttaccacaggcaacggctgtgctctgtctttgatgtcctttgcagtgaattacagccatctgctgaggaagccaaacagcttcaagcagggccaaaatttcttctttgtttttaatagtctttcctgctgtggtgagtagccctcactcttgatagatgactccatgtacatgtacagtagcaaaagtatacctgctgtcagtgtaaatgttaatacatttgtccttaccccatcagagagcctgagtgagggcgaccaattcagccttctgtgctgaggtacctgccggccgtgcctaggcccacagtatatctgtctctgttggaatggctgcaccagcctttcatactccctgttcaaggaagctactgccatctgtaaccacggtggcatccaactcctttgggggcacatctcagagatcaggtcggccagtttccatagtctctaacagttcttggcagtcatggacaggtgtggtaaggtctggatcagggagcaaggtagctggatttaaacaccttgtgggagagaaagctaaacaaggctgatctaacagtaaactctgatactgcaggatgcgagcatttgacatccatttgccagaagcacttcatagcaaagtttctatggcatgaggagctgtaagggttaaattctggcctagagtcagtttatcagcctcctggaccaggcttgtttttgctgctgtggctcgcagacaacgtggccacctggagaccacagggtctagctttttagacaaataggccactgggggtcaccatggtcccaaagtctgagtaagtacacctttagcaactccctggctctcatgaacaaaaaggtgaaatggttttgagatatttgggagggcaagagcaggggcctcagttaatgtcttttttagattttgaaaagcctgttcttctttgtcagtccaaactagtgggccattccctccggtagcagtgtacaggggcttagcgatttctgtgaaccccagtatgcataaatgacattatcccatggtccccaggaattcacatacctgtctcttggtggtgggagtggggattcgcaggatggcttccttttgagcactggtgagtgccgtttttcctttgtttatcttttaccctaggtaggaaactctgggaagacaaagctgggccttcttggtgagacctggtacccgagttcctgcagaaggccaagcaggtccctagtatgttgcaggcagctgtcagtaatttcagtagctaataaaagatcatccatgtactggagaagagtacagttagggtgactggctcagaacggtatgagatcttgttggagagcttctccaaaaagtgtgggggaatttttaaaaccctggggtaactgggtccaggttaattgggtggtgtttcctgagccaggatctgtccattcaaaagcaaagataggttggctttttgggggccagaggaatagccaagaaggcatcctttaagtcagtgacagtgtatactgtatgttctggtgggagcagtctgagtaaagtataagagttacggacagttggatggatggtaactgtccacttgttaacctctctcaagtcctgtacaggctggtaatcatttgttctgggtttctggactggcaaagatggagtattccaggcagactcacatggtgtgaatataccagcttgtaacagttgctgaatatggggatagatttcccctctagcctgctgactcataggatattgttttacctggactagcaaggcagtggccaggagttgtacaactactggcagatagtgctttgccagtcctgggggtttgactcagcccagactcaaggaaagagagtctgtaaatccagtaggagaggattaattttattatccagtgcttgtgagggtgaaactaagagattttttttgatggaggggtggttagcaggagctgaacagcagtgggcattgtgtcccctaaagcaaggtgagcttgttgggccaagaaggagatagacgccttcagcttatgaagtaggtctcatccaaggaggggaaaggggcactctcggactatgagaaatgagtgggttgctcttttctgtcccaaactcacctctcatgagtgggtgacaggatattcctgaatagctccagtatccccttgcacagccacctttttattagagacactgcccaagggcatttgcagtactgagtgttctgccctggtgtcaattaggaaacgtacaggccggccccccactgtggcggacaccatgggttcccgggggccaagggagagggagacccagccccatcaatcagcatattcctccacagcagggaggatgaggacctttttattctctggtttttcttctggttttaatgggcgttccttcttccagtgtcaaatctgcttgcaataagcacattggttttttagtacaggagcctgctcacctttttggcctttttggcagggacccgagatctcctggccagcgctctgtgctgggggcccttccctcctggcttcttggatggcagccactaagatttttgcctgtctttttgatgctttgtcagcagccttttcagctgcctgagatgcctctttttgtttttcaaactcttgattgtcaaaaactttctgtgctatttctaaaagctgaatgatattcattccagcaaatccctttaatttttgtaatttctttttaatatcaggggcctcctgagccacaaatgccaaattaatagcacggctattcttaggagccgctggctcaaaaggggtgtaagtccaataggcctcctggaggtgttccaaaaatgctcccagtgactcatcaggcccctagaaaacttcagttgtcttagataaatttatgggtttttgagttgctcctttgatacccacaaggagataccagtgaaaatcatccaaagctgtctttccccatgaggagtttggatcccaactgggccgggtagagggaaaaacctccactaggaggtcttgggcttccccctctggtctaccggctgatgtaaggaaatacttcctagcctcccttcagatacagtccctctcttcagaggtgaaaagtgttaaaaggagttcctgacaggcatcccaggtgggccagtgagtccggagcatggattccatcagtgaggtcaagacctggggcttttcagagtaggggggattatgaacctttcaattgtacaggtcagaagtagagaaggggacataaactaaaaatggagcagagcgctcactgcctggagggatttgggcctctctcagcaggaggagaggggccacctcctctggctgaggccgtaattgggtggctataggtggagaagccacagagcatgtagtcaaggagacatgggaagattctgggagagcaggagggttgtagggtggcaaacatgggtgaggaaaactttcctcttctttagaaggaggcagtacaggaggagccgagggagctgagggttggggcaaaagtgcagtcgggctcaaaaggacctgggaggtgggatcatgaatggtgcatgagcagagccatggaggagggctctggaccaaatctagccattgatcaatgtaaggaaactgattggggtgtccgggagttccagcaatgacctgccacacagtctgcacagttgtgagattcagtgacccttctaggggccacctggttccaaactgtggccattccacttcataaagtgtccagagtttgctttcttaaggcagactccataatcctctgagaagcccagagaggaattttgtaacgtatattggaagggctccaatctttatggggccaggaagaagagttccccattctggaggcaattaacaaggtctaggcgaaatattaaactcagcatggacagagaaattcacaatctggggggctgtagtataggaagaacagaagtattataaccagaagaagtaggaaaacaactatagccaacacttcttgtcacataagttctgtttctttaagctttgagatctagggggaggacaagaggtgggtctgaggccagtgggacctatgtgatcctcccctcctttctgacttatagcccaaatatctttggtatctccacgactcaaaggcaaaaagtttaaagttggccctttcttttaaggattttaggagggagagtagagtcattggacgttggacttgctgtgacacaggaaaacaagatgggtggggtaagggatggggatgaggaggaaaggggccactctgatcttttctaaggtaggagagtagccagagggatagaataagaatccaggtggagtaaagcagtatgggcacaggtttctctgcacagtgccttatctaagggcatgggaaaagttatgggatgacagaaaaggtgagcaaggaggactgcagggtggctattttgaatccaccactggtctaaggcagaggtggtccagtcactggggcatggggtgtggcaatccaaatgctagcaatctttatggtgccagaaatcccaaacgggcaaatgttccccacacgcctccccgtaacaacacctgatttgtttctgacagaaaaggcaggactgggaagaccagcccaaatgactgatgagaaatttgacctcctgtgttagaaaatctgcattcaggactttaaagaagttcttgcccagtcatcttcggaaatatcgatgacctgacatgtgaaacttagacagacaccagacaggacaagagacaccggggtatacaaacaattatgacaatttttatagacagacaaggggagggggtcccgtgatgggatcagccagatgcccacctggctgctccgccggaggggacttaggctcctcttggcattggcagaccggtataaacccaccggctcagatcaagctatgcccgatgctgccttaagccttatgaggtcgccacggaaccacaggtgagggcccactccaactccgtagctttcaccgtggagctgcaaactggaaattcaaggacaagcccttgaaccccacattcacacacacacttacacagagtttatcacaattctttattcccattctaaaacagaggtctcctagaaacctgaatgagagaaggagaagagataaaaagagagagagagaaagacagagagaaagacagagagagagagagagagagagagagagagagagagagagagaggctagtcttaacagagaaggctgacagaaaccaggactccgtcctccagcatcctggaatatgggcagagtcagaaggacgccctcgtcagggccgcttccctcccagagaaacagagtcagatctgacttaccttcccaggaccagaaatgcaggactcaggagttgattttggagggcacacaccggcagtcgatccgttcccctccggaagacagtggcctacgggtctctggaacagcttcaggaggtgcctcccctataagcccgctgtccagccaggagagcctggagcgagtccggcactcaccaggtggcaattatcttgctggggcttccaaatgttgtaaccgagcgagttgtagagaaacgccacactctgagactaatttcaggagtccttttattgccggtgaccgagagacagctagtgctcaaaattctctcggccccgaagaaggggctagattttttttatatcgtggtctaaataggggaggcggagtttagctaaagcaatttttacagaagtagaacaggcagaaagttaaaaaaattaattggttacagaagcagttacagaaaaataaacagttccaggtgcaggggtttaaactatcacaaagaggtaaatgcaggggttttaggtgcgtccccaggagctgctggttcagcttgcctcaatatcttatcagtaagtgcattcctggacgtgcttggagtcagcttgcactagttatgcccttaagggagggaggtaaaggggctgtaagtgaaggaaataaaatggagtctgtccggctctctcagctaagagagataatcaggttaaaacaaggtagggtatcaagagatcatgccattgtacttcagcctgggggacaagagcaagactttgtctcaaaaaaaaaaaaaattggtaatatggtgcactgtaagctacagaaagacagttataaagaaagattttatataaggaagaatcttgtatgttaaattcttgttctaaaaggagatgactggttgtttaaagaatggatgtttaggacaagtcagaaagtttgttataagatggtctgtggaaataaagagttgaataattaaaggaaaggcattgccaagattaacactaaagttactttagccaccggatgatgtatttctcccaatcatattgaaagttataaaaatggcctaaacctaaaagtattccctaatggcaagtcaaggggaaaatgtatgtttttctcaaagaaaatgttacttttatattaacgtttctggtaatgtacagcaacatctagtggaggcaaaccagtattacaatccattgggacaactaacaggtgtagaactctgctattataccataaggttgtattaccccactagcagcggtcatcttaatatgaatattctaatcctgtcttcaaaaccttctggtaaaaattatctcttttttgcctaggtgctgcaaacagagccacacgaggacacaccattctttttttttattgtttgtttgtttgatttaagacgaagtctcgctctgtcacccaagctggagtgcagtggtgagatatcggctcactgcaacctccgcctcccaggttgaagcaattctcctgcctcagcctccctagtagatgggattacaggcacgcaacaccaagtctggataatttttgtgtttttattagagatgcggtttcaccatgttggccaggctggtcttgaattcctgacctcaggtgattcacctgcctcggcctcccaaagtgctgggattacaggcataagccactgcacctggcctggacacaccattttttttcaagaactcttagatcaacctcaggaggagccctaactgctgttccccaacatgatggcccttttcagcaggaagtatcttgaaagattcgtcatctgacaccccctaacagcagttaggaatacgtctcctgaggggagaataatataggagttattaagaaattattttaggcatttagagagggtaaaagagttctctcactagaatttttctttaataaaaagcagccccaaagccaattcttttctaacagaaaacagcctgaaaagtcaagctgcaagctgataagcaggctggagactttcatttgtaaatgcaggcggctgtattaaaaggcaagtacatttcaacagaggtgaattcctcctcttttttctttgacaccacttgtgtgggtgtcatggcaccagccaggtaaagccacgtgagcaggtatcatggtgacaggtagaagctacatttgcataataaaagactagggtgggagggccagcctttgcatgggttatgtaaatggcacacctggtcaaccaatctcctgtgccctatgtaaatcaatcactgactcctcaagcttctctacaaaatcaattgtgttctacccgcaaccaggaaattttttaggtgaccctgtttctcagcatgaggagctttctctctctctgttatttttgcctattaaactttctttttttttttttttttttttttttgagacggagtctcactctgtcgcccaggctggagtgcagtggcgccatctcggcccactgccagctctgcctcccgggttcacgccattctcctgcctcagcctcccgagtagctgggactacagacgcccgtcaccacgcccggctaattttttgtatttttagtagagacggggtttcaccgtgttagccaggatagtctcgatctcctgacctcgtgatccacctgcctcggcctcccaaagtgctgggattacaggcgtgttgtctattaaactttccaccccaaaatcaatcctcgtgtgtgttcgtgttctaaattttcctcgtgtgagacaacaaaccccaggtatttaccccagacaatgcagccatttcagagtctgggaaatgaatcttagtcacagaaaaaaagaacagcaatgaacatggcaaggtgcttatgattctggtccactggatcttcctatccctaggaaagtaaataccatcacagtcagcacccagcaagttaccaccatataatttcttgtttgttccaaaataaatacaggtgattcttatcacaaaggcaaataaaaagtagtttactttttaaactgaactgtatcagtttagtttactcttaagttcttataattttgaaaatgcagttgacacttgtatggcttatgaaatttttgatagtctaacattacttgaattgttcaaagaacagtatattttaaattaagaagagtaaactgtatgtgtttgtttcctatatttaaggtttagaatcacaaattacactcctgtttatgatttgaaaacttcaaagtttggtttttccatctgtacatacacagaacagtgttatcgtgctgaaacatttgtatcttaagatggcagtcacagtttccatctgtctggatatattttggacttttgcatgttaaacataagaaagagactttttgttttaggtaatctaagactgttgtacacaaactacagattactgtagggttcagcaaactatgtttataatgtgacattaatatctattttgatgtctaaatcaaaactttttttagaaataattttttttttacaaatatctccacaaattcaggtttattttataaaatggcaggatagtaaagaaataggtggtttgccatagtatatgaatacatgcacttaattaaaataccaaatattataatcaaaatttagatagcagatttaaataatttcttgatttttcactacaggatagaaattcacaaatattttataaatcaaagctattagtattaggttttacttagtagtaatatatatatatattctgggtatttaaaaaatatatatatattctgggtatttgaaaacaccaaattattgatgaaaatgtccattttgaacaaattattgatcatatatatcatacatcatacatacatatcatatatgcaatcatacattatcatatatgtatgatgtataatatatgatcaagaatttgttcaaaatgggtatttttcatcaataatttggtgttttcaaatacccagaagtcttgttttaatcagattaactctaagaatagtttactaattttattttttatggtgtgttcaaaatttgatagtttaatatggattgatgatgggtaaactaatcaatttcttttcaaatctcataggcctattacattgtcaaggatgttattaataaaaattctttcttttaatattgtttacagggatttaggtctagtctaatctgctcaacctgttaatcagtgtcagctgccagattccaactcatttttagtgtgcctatgtgactttttctccatagtctctgaattacattttgattagttattggaatatcatatagcacagctcatacatttaaaacaaaaccaccaggtaaaatgagttctggtttagtataaagaagctgtcaccaagttagtgttacatacatagatggatgtggctcaacaagattttagacaaaaaaatttgaattgaactatggcaacgtgtgttgctatgacttagcctctagtgggcttatgaacaaagacaaatttcagcaaatttatccagttgctttcagtatctctaaagatagtatgtcaagaattctcatgctactgtctgaaaaaacagattcttctcttatctaagaaatcaactggatatatttttataagcttgtgcaagaaaaaactgcaatgcagtactaataattacagacgatataatgtggaaaagaataatctagaatgtcaatttcaatatgtaagtatttaggttgggcatggggactcatgcctgtaatcccagcacttgggaggctgagtcatgtggatcactttaggtctggagttcaaggccagcctggccaacatggtaaaacccatcactactaaaaatacaaaaatcaagcatggtgggaagcacctgtaatcccagctactcaggaggctgaggcaagagaatagcttgaactcaggagacagagattgcagtgaactgagattgaagcaccgcattctagcctgagttacagagtgagattctgcctcaaaaaaaaaaaaaaaaaaaaagtatttaacctttcacttgaaaaatgtgataaaattaagtttttggtaagctttgtgtagcttaacatcagcatagagtagaaaaaaaatctttaaaaatgcaaacaaaaagctacaccaaaaaaactaacatctaccagtgcatacatattgatctttgttttgggagagtctaaagcaaaacatttggtgaacttgatacagttattttgatcacattggcatactgataaaatcattttatttaatttcactgaaacatgttcacatcttaaaaatactgttttgtaacatgaatgataaatgtaaagtctttatcctcaagaggatcctgattctcaagatatatggcaacccgtgtctctggtttctccaaactgaagtttcatgaaggctcaaacatgaagtgagagggagtcaacaacagagcatgagaagcaagaaggatgaggtaggatggtcagctctaaggctcagaggttcctgggggaccccaatataatgatgtcaactatgaagctcactagtaaacataaacataaaaagctgaggctgggcatggtggctcatgcctgtaatcccagcactttgggaggcctaggcaagcggatcacaaggtcaagagatcaagaccatcctggccaacgtggtgaaaccccgtctctactaaaaatacaaaaattagctgggcatggtggcgcacacctctaatcccagctactcaggaggctgaggcacgagaatggcttgaacccgggaggtgaaggttgcagtgagccgagatcacaccactgcattccagcctggtgacagagtgagactccatctcaaaaaaaaaaaaaaaaaaaaaagttgaaaactccatggcttctctttggtgagaaaaagtctctggaattacaaacagtcctgccaaaaggattgagccagaatgacatgtatctaaggattattaaggaggaatgttcataagcacataagtatttgttccaaaacttattacagtagcaatatccttttctgtaattttagcttccccaaggtagggttgctgtagacaaactaagacaaggcactaatatgttgaaggcaattagtttctaaatttaaaaaacttgcaatttttttttttgagatagagtctcgctctgtcacccaggctggagtgtggtggcacaatctcggctcactgcaacctctgtatcccaggttcaagcaagtctcctgcctcagccctccaaatacctgggattacaggtgcctgccaccatgcccagctattttttgcatttttagtagcgacagagtttcaccacgttggccaggccggtctcgaactcctgacctcaggtgatccacccacctcgggctcccaaagggctgggattaccggggtgagccaccacacctggcccaaaaacttgcaataattttataaattttattgaactctgtttcatgtataaatctcacaaaaagacactatccagtagctatttccctgagacttttctgggaatttctgttgcttgatttcaaatcaaccttattagaatcctagtcatttttgaagccctagatgtaataaaagaaagagggcaggaatgaaaccaagtttccccaaacagtcaatgtctaatatattttgttccccaaaatgaccccaaaaaccacacaagctaaaaaacagtgggtttgaaatttaacctacattcaacagtagcagaaaaccatatgtaaaaatcagcaaagtcataacttagaaacattctgttattccagaaaaaataataaaattcttattttggcatttttaaaaaagaaaaaatacactaaatatgacaaaatataccaactcacttatatctttgaaatatgattttctttctcctaagtatttaatataatatttagacaagactttcatgtattatagctaccatgcatgaactaaaatagccttgggggaaataatttttattaataatgaatattgaggctccagaaatgtaaaatgatttatcttggatacacagctagtgacccaaatgaagctcaaatatgtttgatttaaaaattttaattttgccactgttgacaatgttgacataacagctaaatctgagccttagagttgatagttggggaataaatcaagtactattgaggcgggctaggtaatcaagaaagtggctatgtcctggggatgcggcaaccatggtgattgcatgacaactgcagactgccaacacaataagcaccaacatttacattggatttcagctcattcaagaaaagctctctccagcagggaaattcccctgtagagagcacagtttgattttacctgtcctctaactgaccttttactcattgtaatagtaaaaaacactcacgtgtgtggagatttaagatgctaatgagatatgtgacatataaagaaacatgtacaggtactgagtgtgtgtacgaagagaaccacccagaacatggttactagtaacatctctttccacctccttataaataattatgtaagactctcataaatggaatctccttagttccagcctttgctgtatcattctttttttttttttttttttaatttgagatggagtttcgatcttgttgcccaggctggagtgcaatggtgcaatcttggctcaccacaacctccgccacctggattcaagcgattctcctgcctcagcctcccgagtagctgggattacaggtgcctgccacaacaccagctaattttttgtatttttagtagagacagtgttttactacgttggccaggctggtctcaaactcctgacctcaggtgatcttcccacctcagcctcccaaagtgctgggattacaggcgtgagccactgtgcccagcctgaagtattttaaaatggaggttgagagccttgagattaaaggtcagatttgatggtcactccatactcaccactccgatgattctgtattttgttctgatcctggacaagctcccagatgaaatggctgcactgtctggggtaaatacctggggtccattgtctaatgccaggaaaatgtatgacataaacacacaggaggagtgggtttaggagcagaaagtttaatagacaaaaaagaagagagaaagcttcctcatgctgagaaagcaggtcacccagaagagtttctgggtttggggtagaacacgattgattttgtagagaggcttgtggaggcagtgattgatttacatagggcccaggggtttggttgaccaggagtgccatttacatagccagtgaaaacactggctccccaccctagccttttattatgcaaatgcagcttctacctggctgtgaccatgacacctacacacagggtgaaaaggaaaagagggggaagtttccatgttgaaatataactggcttttggtacagctgcctctatttacatatgcaaccctctagcttgcttataagcttgcagtttgactttttaggctactttctgttaggaataaaatggtttgggggctgctttttattaaaggaaaattccagtgagaactcttttacccacttaaactgcctaaaacagtttcttaataaatcctgtattaactcctcttcaacttcatttctattgtggcatgaataattttggactgctttagcatcttcctttaacttctgctaattttctttgactttttattattcttgtccatctctggtggttgctttgctgtaccagtttgagaagttcaggtggtttcaccctcagctgctccagcagtccattcatttggctcaagctcttggacagtttctccccgttcttctgtttgtggcatctgagatttgtcagcagggcgtggttttcaggaaccatggctaccacctcgttccacctgcagggtggctcttgcacttctggtgggtgctgattctacagaaacaacagcagcagccagagcatccacatctggtgtcacccagctcagggacaccctggctgtaaccctgggatgaggtccagctaactgcatagaaatctaaggtcatccagagcatttcccatagctgggtgaaccctcctcagtttgtggagccaggccctcccaccagcttcctgctgcctcctcctctaccatcagagggatgcacaggatgaggaaggagcacggagtcaccatggaagagtccaggggagtgaggatgagctgggacaggcagcctcaggccaagtgcatggtggtgcccctcatacctgagcacaaatcagatcagccactgccactgcagggaggacagagaagcccaggcttcccagccagcctccctctgcaccagtagagatgaaaactattttttttttttttttttttttttttttttttttttttttgagacggagtctcgctctgtcgcccaggctggagtgcagtggcgggatctcggctcactgcaagctccgcctcccgggttcacgccattctcctgcctcagcctcccaagtagctgggactacaggcgcccgccactacgcccggctaattttttgtatttttagtagagacggggtttcaccggaaaactatttcttaaacaaaagtatggagtagaacttgcatatctgacccaatcacattttcattctctttttctttttgttttgctttttcctcttagattgtgctctcctgaagtcagattgggataggaggtttataggaaacttcagaagtatccacttatcaggagtgtgtaaggcgtttatgtagttagacttcaagtttcatgagagtagagaccaaaactttcctttctctattttattttctaaggctaccaaaaggatggcatatcatgtgtgctccacatacatttattggttaaaagaatgaatacatattctttgtaaactgtgaaactatgcaaatcaagcctttattatttttattttctatagtttagttaataaaatcaaatagaaaataatgaagtgtagaatgcagaaagcactatcgaaagtttaatgttgctctccctattcctattcctatccctatccctatccctatccctatccctatccctatccctatccctctccacggtctccctctgatgccgagccgaagctggactgtactgctgccatttctgctcactgcaacctccctgcctgattctcctgcctcaacctgccgagtgcctgcgattgcaggcgtgcgctgccacgcctgactggttttcatatttttttggtggagacggggtttcgctgtgttgtccgggctggtctccagctcctaactgggagtgatctgccagcctcggcctcccgaggtgccgggattgcagtcggagtctcattcactcagtgctcaatggtgcccaggctggagtgcagtggcgtgatctcggctcgctacaacctccacctcccagccgcctgccttggcctcccaaagtgccgagattgcagcctctgcccagccgccaccccatctgggaagtgaggagcgtctctgcctggccgcccatcgtctgggatgtgaggagcccctctgcccagctgcccagtctgggaagtgaggagcgcctcttcccggccgccatcccgtctaggaagtgaggagcgtctctgcccggccgccccgtctgagaagtgaggagcccctccgcccggcagccgccccgtctgggaagtgaggagcgtctccgcctggcagccgccccgtccgggaggtggggggtcagcccctgccctgccagccgccccgtccgggagggaggttgggggggccagcccctggccggccagccgccccgtccgggaggtgggggggcgcctctgcctggccgccccttctgggaagtgaggtgcccctctgcccggccgccaccccatctgggaggtgtacccaacagctcattgagaacgggccatgatgacgatggcggttttgtcgaatagaaaagggggaaatgtggggaaaagattgagaaatcagattgttgctgtgtctgtgtggaaagaagtagacataggagactccattttgttctgtactaagaaaaattcttctgccttgggatcctgttgatctatgaccttacccccaaccctgtgctctctgaaacatgtgctgtgtccactcagggttaaatggattaagggcggtgcaagatgtgctttgttaaacagatgcttgaaggcagcatgctcgttaagagtcatcaccactccctaatctcaagtacccagggacacaaacactgcggaaggccccagggccctctgcctaggaaaaccagagacctttgttcacatgtttatctgctgaccttccctccactattgtcctatgaccctgccaaatcctcctctctgagaaacacccaagaatgatcaataaaaaaactaaataaataaaaatttaaaaaaaaagaaagtttaatgttaacccagcacacatgggtaaaatacattttttttttttttcagacggagtttcactcttgttgccttggctggagtgcaatggtgcgatgtgggctcaccgcaacctcacctcccgggttcaagcgatttttcctgcctcagcctcctgagtagctgggattacaggcatgcgccaccatgcccagctaattttgtagttttagtagaaacggtgttgccccatgttggtcaggctggtctcgaactcctgacctcaggtgatccacctgcctcggcctcccaaagtgctgggattataggcgtgagccacctggcccggccattaaaatttttagtttctaaatttgggaccattataattacatttaaattgccacatgaggatggaacatgaaacctgacttcaggagagcacaatttaaggggaaatggcaaaaaaaaaaaaaaaaaaagaaagaaaaagaaaaatgaaaatttgattcggtcagatccgcaagttctcctccatactttttgtttttttagaaaataattctttcctctgctggtgcagagtgaggctagctgggggagcctgggccccactgtcctcccggaggtggcagtggccgatttctgctcaggcatgaggggcgccgccatgtcctgggcctgaggctgcccagcccagcccctcctcactcctttggactcttccacggtgtctccaggcccctgcaccatcctgtgtaactctctgatgaaaggcgaggtggcagcatgaagatgatgggggaactgccccgcatgccaaggaaagctcgcccagctgcacaaaatgctctggttgacatcgggtttctgcgcaccaagctgcgccatgaccaagggttagagccgaggcgtccaccggctgggccaccccggacgtgggcgctccatctgctcctgcggttcctgctgtgcttggctaagccgtggctggaaccggcgcccgccagaagtgcaggagccgccctgccggcagaaagagggcatggtcgctgaaaaccaggccctgctgacaaatctcagacgccaggaacagaagaaccacaaaaatggacggaccgttggaacacctgagggtgaagttgtgcgaactcctcaaagtggaacagcaaagcagccaccagagatggactagaaagatgaaaaattagcagaaatcaaaggcagatgctaaagcagtgcaaaaccgttcacacaacgatagagacggaattgatgaagaagtttgagaaatgaatgacagaaagaaaggacagcagtgaccatggtaaggtgctgacgattctggtccactggatcccatcatccctagggcagtaaatctcatcacagtcaccactcagcaagttaccaccgcagcatttcctgtttgttccaaaatgaataaaagtgattctcatcacaagggcaaatacagagtagtttattattattatttttaactaaactgtagcggtttagttt
